(19) United States
(12) Patent Application Publication
(10) Pub. No.: US 2022/0112497 A1
(43) Pub. Date: Apr. 14, 2022

(54) CANCER-SPECIFIC MOLECULES AND METHODS OF USE THEREOF

(71) Applicant: Envisagenics, Inc., New York, NY (US)

(72) Inventors: Paulina Zheng, New York, NY (US); Anson Abraham, Roslyn Heights, NY (US); Maria Luisa Pineda, Long Island City, NY (US); Martin Akerman, Huntington, NY (US); Gayatri Arun, Huntington Station, NY (US); Priyanka Dhingra, Jersey City, NJ (US); Kendall Anderson, New York, NY (US); Vanessa Frederick, Brooklyn, NY (US); Naomi Yudanin, New York, NY (US); Robin Munch, New York, NY (US)

(21) Appl. No.: 17/495,266

(22) Filed: Oct. 6, 2021

Related U.S. Application Data
(63) Continuation of application No. PCT/US2020/027534, filed on Apr. 9, 2020.
(60) Provisional application No. 62/831,604, filed on Apr. 9, 2019.
(60) Provisional application No. 62/889,217, filed on Aug. 20, 2019.
(60) Provisional application No. 62/944,913, filed on Dec. 6, 2019.
(60) Provisional application No. 62/980,900, filed on Feb. 24, 2020.

(51) Int. Cl. C12N 15/113

(52) U.S. Cl. CPC C12N 15/113; C12N 2310/11; C12N 2320/33; C12N 2310/321; C12N 2310/315

(57) ABSTRACT

Disclosed herein are systems and methods for identifying candidate targets that may be used for therapeutic developments. The systems and methods may comprise receiving and analyzing biologically relevant data to identify information or events such as splicing events that may be statistically significant or specific to certain diseases, illnesses or conditions. Also provided are systems and methods for modulating the statistically significant events using compositions or molecules including small molecule compounds, oligonucleotides, proteins or cells.

### CROSS-REFERENCE

[0001] This application claims the benefit of U.S. Provisional Patent Application No. 62/831,604, filed Apr. 9, 2019, U.S. Provisional Patent Application No. 62/889,217, filed Aug. 20, 2019, U.S. Provisional Patent Application No. 62/944,913, filed Dec. 6, 2019, and U.S. Provisional Patent Application No. 62/980,900, filed Feb. 24, 2020, each of which is hereby incorporated by reference in its entirety.

### SEQUENCE LISTING

[0002] The instant application contains a Sequence Listing which has been submitted electronically in ASCII format and is hereby incorporated by reference in its entirety. Said ASCII copy, created on 16 Dec. 2021, is named EVG-002WOC1_SL.txt and is 1,282,000 bytes in size.

### BACKGROUND

[0003] Cancer and genetic diseases affect more than millions of people in the U.S. Splicing deregulation can be a major hallmark of cancer and genetic diseases, affecting progression, metastasis, and therapy resistance. RNA splicing is the process by which introns, the non-protein coding regions of DNA, are removed from nascent precursor messenger RNA (pre-mRNA), and exons, the protein coding regions of DNA, are joined together to form mature messenger RNA (mRNA). RNA splicing errors may result in spliced RNA that fail to produce functional proteins, thereby causing genetic diseases including many types of cancers.

### SUMMARY

[0004] RNA splicing is a form of RNA processing in which a newly made precursor messenger RNA (pre-mRNA) transcript is transformed into a mature messenger RNA (mRNA). During splicing, introns (intra-genic, non-coding regions) are removed and exons (coding regions) are joined together. RNA splicing not only provides functional mRNA, but may also be responsible for generating additional diversity (i.e., alternative splicing, alternative RNA splicing, or differential splicing). The alternative splicing may result in the production of different mRNAs from the same gene. The mRNAs that represent isoforms arising from a single gene can differ by the use of alternative exons or retention of an intron that disrupts two exons. This process often leads to different protein products that may have related or drastically different, even antagonistic, cellular functions. The alternative splicing may comprise one or more of exon skipping or cassette exon, mutually exclusive exons, alternative donor site, alternative acceptor site, intron retention, and any combination or variation thereof.

[0005] Multiple studies have shown the oncogenic activity of specific splicing events and splicing factors, such as SRSF1, SRSF2, ESRP1, and RBFOX1, in human and animal models. As such, cancer-associated splicing deregulation may be a novel source of clinically-applicable biomarkers and therapeutic targets.

[0006] Provided herein are systems and methods for identifying therapeutic targets (e.g., disease-specific splicing events) in various diseases or illnesses such as cancers. Non-limiting examples of cancers may include prostate cancer, cancers of barrier tissues (i.e. colorectal cancer, lung cancer) and in other TGFb-rich sites like ovaries, AML/hematological disorders, respiratory system cancer, hepatocellular carcinoma (liver cancer) which may include both a TGFb-rich environment and chronic, potentially diet induced inflammation, thoracic cancer, stomach cancer, kidney cancer, pancreatic cancer, skin cancer, or combinations thereof. Examples of some other diseases may include, but are not limited to, autism (i.e., ST7 (ENV19)), lymphatic disease such as syndromic lymphedema-genetic disorder and milory disease, eye degenerative diseases, brain disease- peripheral neuropathy, neurometabolic disease, rare genetic neurological disorders-genetic motor neuron disease, psychiatric disorders, chronic inflammation/autoimmune disease, including IBD, crohn's disease, and similar gastrointestinal disorders, inflammation in pathogenic obesity, including hereditary, childhood, leptin and non-leptin dependent disease, hypertension and/or other comorbidities associated with western diets.

[0007] The methods of the present disclosure may also comprise detecting one or more biomarkers, for example, detecting a presence or an absence of specific DNA sequence, mRNA and/or protein isoforms. The presence or absence of the one or more biomarkers can be used to diagnose disease and/or track disease progression.

[0008] Also provided herein are methods for modulating therapeutic targets (e.g., disease-specific splicing events) using various types of modalities, such as oligonucleotides, small molecules, antibodies, or any combination thereof. In some examples, the modalities may switch pathogenic RNA isoforms to non-pathogenic RNA isoforms. In some examples, the modalities are oligonucleotides including splicing-switch oligonucleotides (SSO), antisense oligonucleotides (ASO), small interfering Ribonucleic Acid (siRNA), conjugated oligonucleotides, or a combination thereof that can knockdown specific isoforms. In some other example, the modalities are antibodies or cell-based (e.g., CAR-T) that may specifically recognize protein isoform of alternatively spliced RNA, and/or therapeutic compounds including ASO, small molecules or biologics that target the isoforms specifically to obtain therapeutic benefit.

[0009] Further provided in the present disclosure are methods and systems for treating diseases or illnesses such as cancers. The systems and methods may comprises administering an effective amount to modalities to a subject having the diseases or illnesses. The modalities may be oligonucleotides, small molecules, antibodies, or any combination thereof, which are designed to achieve disease-specific targeting. For example, some of the disease-specific splicing events that have been identified can open up grooves for small molecule binding. In that case, small molecules can be designed to target the region that is created because of a splicing change. In another example, splicing changes of the membrane bound proteins can display altered surface epitopes that can be specifically targeted using antibodies.

[0010] An aspect of the present disclosure provides a method of modulating splicing in a pre-mRNA in a biological sample comprising: contacting the biological sample with an antisense compound comprising one or more oligonucleotides having at least 90% sequence identity to oligonucleotides selected from Tables 2-33.

[0011] In some embodiments, the biological sample comprises a cell, a tissue, or a blood sample. In some embodiments, the biological sample is in vitro. In some embodiments, the biological sample is a cell. In some embodiments, the method further comprises measuring viability of the cell. In some embodiments, the measuring is over a predetermined time period. In some embodiments, the method further comprises monitoring the viability of the cell over a predetermined time period. In some embodiments, the method further comprises decreasing or increasing a concentration of the antisense compound based on the viability of the cell. In some embodiments, the method further comprises decreasing or increasing a concentration of the antisense compound when the viability of the cell is below a cut-off value. In some embodiments, the cut-off value is about 80%. In some embodiments, the cut-off value is about 90%. In some embodiments, the antisense compound comprises the one or more oligonucleotides at a concentration of greater than or equal to about 300 nM. In some embodiments, the antisense compound comprises the one or more oligonucleotides at a concentration of less than or equal to about 450 nM. In some embodiments, the one or more oligonucleotides comprise deoxyribonucleic acid (DNA), ribonucleic acid (RNA), or a combination thereof. In some embodiments, the RNA comprises small interfering RNA (siRNA). In some embodiments, the one or more oligonucleotides comprises single-stranded oligonucleotides, double-stranded oligonucleotides, or a combination thereof. In some embodiments, the biological sample is from a subject having or suspected of having a disease or condition. In some embodiments, the disease or condition comprises a genetic disease, a CNS disease, an inflammatory disease, a neurodegenerative disease, a cardiovascular disease, an autoimmune disease, or cancer. In some embodiments, the disease is cancer. In some embodiments, the cancer comprises lung cancer, kidney cancer, or breast cancer. In some embodiments, the breast cancer is triple-negative breast cancer. In some embodiments, the one or more nucleotides comprise oligonucleotides selected from Tables 2-33. In some embodiments, the one or more oligonucleotides comprise a modified oligonucleotide. In some embodiments, the modified oligonucleotide comprises at least one modified internucleoside linkage In some embodiments, the at least one modified internucleoside linkage is phosphorothioate linkage In some embodiments, the modified oligonucleotide comprises one or more modified nucleotides. In some embodiments, the modified oligonucleotide comprises one or more modified nucleosides. In some embodiments, a modified nucleoside of the one or more modified nucleosides comprises a modified sugar moiety. In some embodiments, the modified sugar moiety is a 2′-substituted sugar moiety. In some embodiments, the 2′-substituted sugar moiety comprises a modification selected from the group consisting of 2′-O-methoxyethyl, 2′-fluoro, 2′-dimethylaminooxyethoxy, 2′-dimethylaminoethoxyethoxy, 2′-guanidinium, 2′-O-guanidinium ethyl, 2′-carbamate, 2′aminooxy, 2′-acetamido, and locked nucleic acid. In some embodiments, the modified oligonucleotide comprises a plurality of modified nucleosides each comprising a modified sugar moiety. In some embodiments, at least a subset of the plurality of modified nucleosides are different from one another. In some embodiments, the modulating comprises inducing or enhancing exon skipping. In some embodiments, the modulating comprises inducing or enhancing exon inclusion. In some embodiments, the modulating comprises promoting a splicing switch. In some embodiments, the modulating comprises down-regulation or up-regulation of splicing. In some embodiments, the antisense compound specifically binds to a segment of a pre-mRNA encoded by a gene comprising NEDD4L, MAP3K7, NFYA, ESYT2, MARK2, ST7, ARVCF, SYTL2, R3HDM1,COL4A3BP, TANGO2, SEPT9, ROBO1,FAM122B, CD47, LSR, PBX1,EPB41, ADAM15, EPB41L1, ABI1, FLNB, CTNND1, GPR160, ITGB3BP, INCENP, DENND1B, or CA12.

[0012] Another aspect of the present disclosure provides a pharmaceutical composition comprising (i) an antisense compound comprising one or more oligonucleotides having at least 90% sequence identity to oligonucleotides selected from Tables 2-33, and (ii) a pharmaceutically acceptable diluent or carrier.

[0013] In some embodiments, the antisense compound comprises the one or more oligonucleotides at a concentration of greater than or equal to about 300 nM. In some embodiments, the antisense compound comprises the one or more oligonucleotides at a concentration of less than or equal to about 450 nM. In some embodiments, the one or more oligonucleotides comprise deoxyribonucleic acid (DNA), ribonucleic acid (RNA), or a combination thereof. In some embodiments, the RNA comprises small interfering RNA (siRNA). In some embodiments, the one or more oligonucleotides comprises single-stranded oligonucleotides, double-stranded oligonucleotides, or a combination thereof. In some embodiments, the pharmaceutical composition is used for treating or alleviating a disease or condition. In some embodiments, the disease comprises a genetic disease, a CNS disease, an inflammatory disease, a neurodegenerative disease, a cardiovascular disease, an autoimmune disease, or cancer. In some embodiments, the disease or condition is cancer. In some embodiments, the cancer comprises lung cancer, kidney cancer, or breast cancer. In some embodiments, the breast cancer is triple-negative breast cancer. In some embodiments, the one or more nucleotides comprise oligonucleotides selected from Tables 2-33. In some embodiments, the one or more oligonucleotides comprise a modified oligonucleotide. In some embodiments, the modified oligonucleotide comprises at least one modified internucleoside linkage In some embodiments, the at least one modified internucleoside linkage is phosphorothioate linkage In some embodiments, the modified oligonucleotide comprises one or more modified nucleotides. In some embodiments, the modified oligonucleotide comprises one or more modified nucleosides. In some embodiments, a modified nucleoside of the one or more modified nucleosides comprises a modified sugar moiety. In some embodiments, the modified sugar moiety is a 2′-substituted sugar moiety. In some embodiments, the 2′-substituted sugar moiety comprises a modification selected from the group consisting of 2′-O-methoxyethyl, 2′-fluoro, 2′-dimethylaminooxyethoxy, 2′-dimethylaminoethoxyethoxy, 2′-guanidinium, 2′-O-guanidinium ethyl, 2′-carbamate, 2′aminooxy, 2′-acetamido, and locked nucleic acid. In some embodiments, the modified oligonucleotide comprises a plurality of modified nucleosides each comprising a modified sugar moiety. In some embodiments, at least a subset of the plurality of modified nucleosides are different from one another. In some embodiments, the pharmaceutical composition is used for modulating splicing of a pre-mRNA encoded by a gene comprising NEDD4L, MAP3K7, NFYA, ESYT2, MARK2, ST7, ARVCF, SYTL2, R3HDM1, COL4A3BP, TANGO2, SEPT9, ROBO1, FAM122B, CD47, LSR, PBX1, EPB41, ADAM15, EPB41L1, ABI1, FLNB, CTNND1, GPR160, ITGB3BP, INCENP, DENND1B, or CA12. In some embodiments, the modulating comprises inducing or enhancing exon skipping. In some embodiments, the modulating comprises inducing or enhancing exon inclusion. In some embodiments, the modulating comprises promoting a splicing switch. In some embodiments, the modulating comprises down-regulation or up-regulation of splicing.

[0014] Another aspect of the present disclosure provides an antisense compound for use in preparation of a medicament for the treatment of a disease or a condition, the antisense compound comprising one or more oligonucleotides having at least 90% sequence identity to oligonucleotides selected from Tables 2-33.

[0015] In some embodiments, the antisense compounds comprise the one or more oligonucleotides at a concentration of greater than or equal to about 300 nM. In some embodiments, the antisense compound comprises the one or more oligonucleotides at a concentration of the concentration is less than or equal to about 450 nM. In some embodiments, the one or more oligonucleotides comprise deoxyribonucleic acid (DNA), ribonucleic acid (RNA), or a combination thereof. In some embodiments, the RNA comprises small interfering RNA (siRNA). In some embodiments, the one or more oligonucleotides comprises single-stranded oligonucleotides, double-stranded oligonucleotides, or a combination thereof. In some embodiments, the disease or condition comprises a genetic disease, a CNS disease, an inflammatory disease, a neurodegenerative disease, a cardiovascular disease, an autoimmune disease, or cancer. In some embodiments, the disease is cancer. In some embodiments, the cancer comprises lung cancer, kidney cancer, or breast cancer. In some embodiments, the breast cancer is triple-negative breast cancer. In some embodiments, the one or more nucleotides comprise oligonucleotides selected from Tables 2-33. In some embodiments, the one or more oligonucleotides comprise a modified oligonucleotide. In some embodiments, the modified oligonucleotide comprises at least one modified internucleoside linkage. In some embodiments, the at least one modified internucleoside linkage is phosphorothioate linkage. In some embodiments, the modified oligonucleotide comprises one or more modified nucleotides. In some embodiments, the modified oligonucleotide comprises one or more modified nucleosides. In some embodiments, a modified nucleoside of the one or more modified nucleosides comprises a modified sugar moiety. In some embodiments, the modified sugar moiety is a 2′-substituted sugar moiety. In some embodiments, the 2′-substituted sugar moiety comprises a modification selected from the group consisting of 2′-O-methoxyethyl, 2′-fluoro, 2′-dimethylaminooxyethoxy, 2′-dimethylaminoethoxyethoxy, 2′-guanidinium, 2′-O-guanidinium ethyl, 2′-carbamate, 2′aminooxy, 2′-acetamido and locked nucleic acid. In some embodiments, the modified oligonucleotide comprises a plurality of modified nucleosides each comprising a modified sugar moiety. In some embodiments, at least a subset of the plurality of modified nucleosides are different from one another. In some embodiments, the treatment comprising modulating splicing of a pre-mRNA encoded by a gene comprising NEDD4L, MAP3K7, NFYA, ESYT2, MARK2, ST7, ARVCF, SYTL2, R3HDM1, COL4A3BP, TANGO2, SEPT9, ROBO1, FAM122B, CD47, LSR, PBX1, EPB41, ADAM15,EPB41L1, ABI1, FLNB,CTNND1, GPR160, ITGB3BP, INCENP,DENND1B, or CA12. In some embodiments, the modulating comprises inducing or enhancing exon skipping. In some embodiments, the modulating comprises inducing or enhancing exon inclusion. In some embodiments, the modulating comprises promoting a splicing switch. In some embodiments, the modulating comprises down-regulation or up-regulation of splicing.

[0016] Another aspect of the present disclosure provides a method of modulating splicing in a pre-mRNA in a biological sample comprising: contacting the biological sample with a composition which specifically binds to a segment of the pre-mRNA which is encoded by a gene selected from the group consisting of NEDD4L, MAP3K7, NFYA, ESYT2, MARK2, ST7, ARVCF, SYTL2, R3HDM1,COL4A3BP, TANGO2, SEPT9, ROBO1, FAM122B, CD47, LSR, PBX1,EPB41, ADAM15,EPB41L1, ABI1, FLNB,CTNND1, GPR160, ITGB3BP, INCENP, DENND1B, and CA12.

[0017] In some embodiments, the segment of the pre-mRNA is 9-150 nucleotides in length. In some embodiments, the composition comprises oligonucleotides. In some embodiments, the oligonucleotides are sufficiently complementary to the segment of the pre-mRNA. In some embodiments, the oligonucleotides have at least 80% sequence identity to the segment of the pre-mRNA. In some embodiments, the oligonucleotides have at least 90% sequence identity to the segment of the pre-mRNA. In some embodiments, the oligonucleotides comprise 10-50 nucleotides. In some embodiments, the oligonucleotides comprise 15-30 nucleotides. In some embodiments, the composition comprises small molecules, nucleic acid molecules, engineered cells, proteins, or a combination or modification thereof. In some embodiments, the composition comprises a chimeric molecule. In some embodiments, the chimeric molecule comprises a nucleic acid molecule and a protein. In some embodiments, the nucleic acid molecule comprises DNA, RNA, PNA, or a combination or hybrid thereof. In some embodiments, the composition induces or enhances exon skipping in the pre-mRNA. In some embodiments, the composition induces or enhances exon inclusion in the pre-mRNA. In some embodiments, the composition promotes a splicing switch in the pre-mRNA. In some embodiments, the composition down-regulates or up-regulates of splicing in the pre-mRNA. In some embodiments, the composition prevents splicing in the pre-mRNA.

[0018] Another aspect of the present disclosure provides a method for treating a disease or condition in a subject in need thereof, comprising: administering an effective amount of a composition to the subject, which composition specifically binds to a segment of a pre-mRNA which is encoded by a gene selected from the group consisting of NEDD4L, MAP3K7, NFYA, ESYT2, MARK2, ST7, ARVCF, SYTL2, R3HDM1, COL4A3BP, TANGO2, SEPT9, ROBO1, FAM122B, CD47, LSR, PBX1, EPB41, ADAM15, EPB41L1, ABI1, FLNB, CTNND1, GPR160, ITGB3BP, INCENP, DENND1B, and CA12, thereby modulating splicing in the pre-mRNA.

[0019] In some embodiments, the segment of the pre-mRNA is 9-150 nucleotides in length. In some embodiments, the composition comprises oligonucleotides. In some embodiments, the oligonucleotides are sufficiently complementary to the segment of the pre-mRNA. In some embodiments, the oligonucleotides have at least 80% sequence identity to the segment of the pre-mRNA. In some embodiments, the oligonucleotides have at least 90% sequence identity to the segment of the pre-mRNA. In some embodiments, the oligonucleotides comprise 10-50 nucleotides. In some embodiments, the oligonucleotides comprise 15-30 nucleotides. In some embodiments, the composition comprises small molecules, nucleic acid molecules, engineered cells, proteins, or a combination or modification thereof. In some embodiments, the composition comprises a chimeric molecule. In some embodiments, the chimeric molecule comprises a nucleic acid molecule and a protein. In some embodiments, the nucleic acid molecule comprises DNA, RNA, PNA, or a combination or hybrid thereof. In some embodiments, the composition induces or enhances exon skipping in the pre-mRNA. In some embodiments, the composition induces or enhances exon inclusion in the pre-mRNA. In some embodiments, the composition promotes a splicing switch in the pre-mRNA. In some embodiments, the composition down-regulates or up-regulates of splicing in the pre-mRNA. In some embodiments, the composition prevents splicing in the pre-mRNA. In some embodiments, the effective amount comprises at least 300 nM of the composition. In some embodiments, the effective amount comprises at most 500 nM of the composition. In some embodiments, the disease or condition comprises a genetic disease, a CNS disease, an inflammatory disease, a neurodegenerative disease, a cardiovascular disease, an autoimmune disease, or cancer. In some embodiments, the disease or condition is cancer. In some embodiments, the cancer comprises lung cancer, kidney cancer, or breast cancer. In some embodiments, the breast cancer is triple negative breast cancer.

[0020] Another aspect of the present disclosure provides a method for screening, diagnosis or prognosis of a disease or condition in a subject, comprising: (a) analyzing a biological sample from the subject to detect a level of expression of a protein isoform, which protein isoform is encoded by a gene selected from the group consisting of NEDD4L, MAP3K7, NFYA, ESYT2, MARK2, ST7, ARVCF, SYTL2, R3HDM1, COL4A3BP, TANGO2, SEPT9, ROBO1, FAM122B, CD47, LSR, PBX1, EPB41, ADAM15, EPB41L1, ABI1, FLNB, CTNND1, GPR160, ITGB3BP, INCENP, DENND1B, and CA12; and (b) determining a difference of the level of expression of the protein isoform in the biological sample relative to a level of expression of the protein isoform in a biological sample of a control, wherein the difference is indicative or predicative of the disease or condition.

[0021] In some embodiments, the biological sample is a cell, a tissue, or a blood sample. In some embodiments, (a) comprises quantitatively detecting an amount of the protein isoform in the biological sample. In some embodiments, the difference comprises an increase or a decrease of the level of expression of the protein isoform in the biological sample relative to the level of expression of the protein isoform in the biological sample of the control. In some embodiments, the increase of the level of expression of the protein isoform in the biological sample relative to the level of expression of the protein isoform in the biological sample of the control is indicative or predicative of the disease or condition. In some embodiments, the decrease of the level of expression of the protein isoform in the biological sample relative to the level of expression of the protein isoform in the biological sample of the control is indicative or predicative of the disease or condition. In some embodiments, the protein isoform comprises alternatively spliced protein isoforms. In some embodiments, the alternatively spliced protein isoforms are formed by alternative splicing of the gene. In some embodiments, the alternative splicing comprises exon skipping, exon inclusion, intron retention, competing 5′ splice sites, competing 3′ splice sites, multiple promoters, multiple poly(A) sites or a combination thereof. In some embodiments, the method further comprises detecting a level of expression of the gene in the biological sample. In some embodiments, the method further comprises detecting a presence or an absence of a difference of the level of expression of the gene in the biological sample of the subject relative to a level of expression of the gene in the biological sample in the control. In some embodiments, the presence or the absence of the difference of the level of expression of the gene is further indicative or predicative of the disease or condition. In some embodiments, the presence of the difference comprises an increase or a decrease of the level of expression of the gene in the biological sample of the subject relative to the level of expression of the gene in the biological sample in the control. In some embodiments, the method further comprises monitoring a progression of the disease or condition in the subject. In some embodiments, the monitoring comprises repeating (a) multiple times over a predetermined time period. In some embodiments, the method further comprises providing a treatment to the subject upon diagnosis of the disease or condition in the subject. In some embodiments, the treatment comprises administering to the subject an effective amount of a composition which modulates the level of the protein isoform expression. In some embodiments, the treatment comprises administering to the subject an effective amount of a composition which modulates splicing of the gene encoding the protein isoform. In some embodiments, the disease or condition comprises a genetic disease, a CNS disease, an inflammatory disease, a neurodegenerative disease, a cardiovascular disease, an autoimmune disease, or cancer. In some embodiments, the disease or condition is cancer. In some embodiments, the cancer comprises lung cancer, kidney cancer, or breast cancer. In some embodiments, the breast cancer is triple negative breast cancer.

[0022] Additional aspects and advantages of the present disclosure will become readily apparent to those skilled in this art from the following detailed description, wherein only illustrative embodiments of the present disclosure are shown and described. As will be realized, the present disclosure is capable of other and different embodiments, and its several details are capable of modifications in various obvious respects, all without departing from the disclosure. Accordingly, the drawings and description are to be regarded as illustrative in nature, and not as restrictive.

### INCORPORATION BY REFERENCE

[0023] All publications, patents, and patent applications mentioned in this specification are herein incorporated by reference to the same extent as if each individual publication, patent, or patent application was specifically and individually indicated to be incorporated by reference. To the extent publications and patents or patent applications incorporated by reference contradict the disclosure contained in the specification, the specification is intended to supersede and/or take precedence over any such contradictory material.

### BRIEF DESCRIPTION OF THE DRAWINGS

[0024] The novel features of the invention are set forth with particularity in the appended claims. A better understanding of the features and advantages of the present invention will be obtained by reference to the following detailed description that sets forth illustrative embodiments, in which the principles of the invention are utilized, and the accompanying drawings (also “Figure” and “FIG.” herein), of which:

[0025] This patent or application file contains at least one drawing executed in color. Copies of this patent or patent application publication with color drawing(s) will be provided by the Office upon request and payment of the necessary fee.

[0026] FIG. 1 shows an exemplary oncoprint summary of recurring genomic aberration and transcriptional changes for splicing associated RNA binding proteins in triple-negative breast cancer (TNBC) patient samples.

[0027] FIG. 2 schematically illustrates an example of luminal versus TNBC RNA-seq data analysis and target selection.

[0028] FIG. 3 shows an examplary diagram of splicing changes in the Cancer Genome Atlas (TCGA) and cell lines showing independent and overlapping events.

[0029] FIG. 4 shows examplary reverse transcription polymerase chain reaction (RT-PCR) images showing differential splicing of selected candidates in luminal versus TNBC cell lines.

[0030] FIG. 5 shows exemplary Western blot of protein lysates from luminal and basal cell lines showing the isoform expression at the protein level for different genes.

[0031] FIG. 6 shows a survival analysis of breast cancer patients expressing NEDD4L inclusion versus skipped isoforms showing poor overall survival for patents with skipped isoform.

[0032] FIG. 7 shows comparison of splicing differences and total gene expression differences across multiple breast cancer subtypes.

[0033] FIG. 8 illustrate SpliceLearn scores and corresponding eCLIP peaks around the NEDD4L exon trio. The scores can be used for designing oligo sequences and the bottom panel shows the splice switching experimental results in which the high scoring ASOs (GTGGGTTTCAGGGATTCTGA (SEQ ID NO: 1), CCCTGATTCAGACAGCAGGG (SEQ ID NO:2) significantly switched to the inclusion isoform in MDA-MB-231 cells.

[0034] FIG. 9 shows an exemplary experimental validation and quantitation of switching off NEDD4L in MCF7 and MDA-Mb-231 cells treated with 400 nM specific oligos and controls treated with either lipofectamine or PBS. Radioactive RT-PCR is shown above and quantitation of the results is shown below.

[0035] FIG. 10A shows an exemplary dose response curve for an SSO (GTGGGTTTCAGGGATTCTGA (SEQ ID NO: 1)) targeting NEDD4L which promotes inclusion. The SSO treatment causes dose dependent viability loss in MDA-Mb-231 cells compared to MCF7 cells. The optimal LC50 value is about 370 nM.

[0036] FIG. 10B shows an exemplary dose response curve for an SSO (CCCTGATTCAGACAGCAGGG (SEQ ID NO: 2)) targeting NEDD4L which promotes inclusion. SSO treatment causes dose dependent viability loss in MDA-Mb-231 cells compared to MCF7 cells. The optimal LC50 value is about 420 nM.

[0037] FIG. 11 shows exemplary PCR validations for a candidate gene.

[0038] FIG. 12 shows exemplary PCR validations for a candidate gene.

[0039] FIG. 13 shows exemplary PCR validations for a candidate gene.

[0040] FIG. 14 shows exemplary PCR validations for a candidate gene.

[0041] FIG. 15 shows an exemplary survival analysis of breast cancer patients expressing long and short isoforms for a candidate gene.

[0042] FIG. 16 shows an exemplary survival analysis of breast cancer patients expressing long and short isoforms for a candidate gene.

[0043] FIG. 17 shows an example selection criteria table.

[0044] FIG. 18 shows how the selection criteria is used to identify more target genes than use of splicing alone.

### DETAILED DESCRIPTION

[0045] While various embodiments of the invention have been shown and described herein, it will be obvious to those skilled in the art that such embodiments are provided by way of example only. Numerous variations, changes, and substitutions may occur to those skilled in the art without departing from the invention. It should be understood that various alternatives to the embodiments of the invention described herein may be employed.

[0046] Whenever the term “at least,” “greater than,” or “greater than or equal to” precedes the first numerical value in a series of two or more numerical values, the term “at least,” “greater than” or “greater than or equal to” applies to each of the numerical values in that series of numerical values. For example, greater than or equal to 1, 2, or 3 is equivalent to greater than or equal to 1, greater than or equal to 2, or greater than or equal to 3.

[0047] Whenever the term “no more than,” “less than,” or “less than or equal to” precedes the first numerical value in a series of two or more numerical values, the term “no more than,” “less than,” or “less than or equal to” applies to each of the numerical values in that series of numerical values. For example, less than or equal to 3, 2, or 1 is equivalent to less than or equal to 3, less than or equal to 2, or less than or equal to 1.

### Identification of Candidate Targets for Therapeutic Development

[0048] In some aspects of the present disclosure, methods and systems for detecting or identifying candidate drug targets are provided. The candidate drug targets may be associated with specific diseases, illnesses or conditions. The diseases, illnesses or conditions may comprise cancer. Non-limiting examples of diseases, illnesses or conditions may include but not limited to ductal carcinoma in duct tissue in a mammary gland, medullary carcinomas, colloid carcinomas, tubular carcinomas, breast cancer or subtypes thereof; ovarian cancer, including epithelial ovarian tumors such as adenocarcinoma in the ovary and an adenocarcinoma that has migrated from the ovary into the abdominal cavity, uterine cancer, cervical cancer such as adenocarcinoma in the cervix epithelial including squamous cell carcinoma and adenocarcinomas; prostate cancer, such as a prostate cancer selected from the following: an adenocarcinoma or an adenocarcinoma that has migrated to the bone; pancreatic cancer such as epithelioid carcinoma in the pancreatic duct tissue and an adenocarcinoma in a pancreatic duct; bladder cancer such as a transitional cell carcinoma in urinary bladder, urothelial carcinomas (transitional cell carcinomas), tumors in the urothelial cells that line the bladder, squamous cell carcinomas, adenocarcinomas, and small cell cancers; leukemia such as acute myeloid leukemia (AML), acute lymphocytic leukemia, chronic lymphocytic leukemia, chronic myeloid leukemia, hairy cell leukemia, myelodysplasia, myeloproliferative disorders, acute myelogenous leukemia (AML), chronic myelogenous leukemia (CML), mastocytosis, chronic lymphocytic leukemia (CLL), multiple myeloma (MM), and myelodysplastic syndrome (MDS); bone cancer; lung cancer such as non-small cell lung cancer (NSCLC), which is divided into squamous cell carcinomas, adenocarcinomas, and large cell undifferentiated carcinomas, and small cell lung cancer; skin cancer such as basal cell carcinoma, melanoma, squamous cell carcinoma and actinic keratosis, which is a skin condition that sometimes develops into squamous cell carcinoma; eye retinoblastoma; cutaneous or intraocular (eye) melanoma; primary liver cancer (cancer that begins in the liver); kidney cancer; thyroid cancer such as papillary, follicular, medullary and anaplastic; AIDS-related lymphoma such as diffuse large B-cell lymphoma, B-cell immunoblastic lymphoma and small non-cleaved cell lymphoma; Kaposi's Sarcoma; viral-induced cancers including hepatitis B virus (HBV), hepatitis C virus (HCV), and hepatocellular carcinoma; human lymphotropic virus-type 1 (HTLV-1) and adult T-cell leukemia/lymphoma; and human papilloma virus (HPV) and cervical cancer; central nervous system cancers (CNS) such as primary brain tumor, which includes gliomas (astrocytoma, anaplastic astrocytoma, or glioblastoma multiforme), Oligodendroglioma, Ependymoma, Meningioma, Lymphoma, Schwannoma, and Medulloblastoma; peripheral nervous system (PNS) cancers such as acoustic neuromas and malignant peripheral nerve sheath tumor (MPNST) including neurofibromas and schwannomas, malignant fibrous cytoma, malignant fibrous histiocytoma, malignant meningioma, malignant mesothelioma, and malignant mixed Mtillerian tumor; oral cavity and oropharyngeal cancer such as, hypopharyngeal cancer, laryngeal cancer, nasopharyngeal cancer, and oropharyngeal cancer; stomach cancer such as lymphomas, gastric stromal tumors, and carcinoid tumors; testicular cancer such as germ cell tumors (GCTs), which include seminomas and nonseminomas, and gonadal stromal tumors, which include Leydig cell tumors and Sertoli cell tumors; thymus cancer such as to thymomas, thymic carcinomas, Hodgkin disease, non-Hodgkin lymphomas carcinoids or carcinoid tumors; rectal cancer; and colon cancer. In some embodiments, the pharmaceutical composition is for the treatment of a non-cancerous hyperproliferative disorder such as benign hyperplasia of the skin (e. g., psoriasis), restenosis, or prostate (e. g., benign prostatic hypertrophy (BPH)).

[0049] The candidate drug targets may comprise one or more genes that are differentially express, exons (e.g., exon duos or exon trios) that are differentially spliced, or a combination thereof. The methods and systems can be exon-centric and highly sensitive in detecting low-abundance aberrant mRNA isoforms.

[0050] Additionally, artificial intelligence (AI) may be utilized by the methods and systems as provided herein. The AI may comprise the use of machine learning algorithms, non-limiting examples of which may comprise supervised (or predictive) learning, semi-supervised learning, active learning, unsupervised machine learning, or reinforcement learning, support vector machines (SVM), linear, logistics, tress, random forest, xgboost, neural networks, deep neural networks, boosting techniques, bootstrapping techniques, ensemble techniques, or combinations thereof.

[0051] As provided herein, the systems or methods may comprise receiving data from a database. The database may be a public database (e.g., TCGA, GTEX, dbGAP), a private database, or a combination thereof. The database may comprise public data, proprietary data, or a combination thereof. The database may comprise clinical or biological data. The database may comprise RNA-seq data. The database may comprise data obtained from a variety of samples, e.g., greater than or equal to about 100, 200, 300, 400, 500, 600, 700, 800, 900, 1,000, 2,000, 3,000, 4,000, 5,000, 6,000, 7,000, 8,000, 9,000, 10,000, 15,000, 20,000, 25,000, 30,000, 40,000, 50,000, 60,000, 70,000, 80,000, 90,000, 100,000, 125,000, 150,000, 175,000, 200,000 samples, or more. At least a subset of the samples may be obtained from different subjects have the same or different diseases, illnesses or conditions.

[0052] The database may comprise data extracted or derived from samples from cell lines from certain diseases, illnesses or conditions, and/or from subjects having certain different diseases, illnesses or conditions. In some cases, the diseases, illnesses or conditions comprise breast cancer or subtypes thereof, for example, liminal A, luminal B, Her2+, TNBC. Non-limiting examples of cell lines may comprise BT483, CAMA1, EFM19, HCC1428, HCC712, IBEP2, KPL1, LY2, MCF7, MDAMB 134, MDAMB134V1, MDAMB 157, MDAMB 175, MDAMB175VII, MDAMB231, MDAMB330, MDAMB361, MDAMB415, MDAMB435, MDAMB436, MDAMB453, MDAMB468, T47D, ZR751, ZR75B, BSMZ, BT474, EFM192A,IBEP1, IBEP3, UACC812, ZR7527, ZR7530, 21MT1, 21MT2, 21NT, 21PT, AU565, HCC1008, HCC1569, HCC1954, HCC202, HCC2218, HH315, HH375, KPL-4, OCUB-F, SKBR3, SKBRS, SUM19OPT, SUM225CWN, UACC893, BT20, CAL148, DU4475, EMG3, HCC38, HCC1143,HCC1187, HCC1395, HCC1599, HCC1739, HCC1806, HCC1937, HCC2157, HCC3153, HCC70, HMT3522, KPL-3C, MA11,MFM223, SUM185PE, SUM229PE, BT549, CAL120, CAL851, HDQ-P1, Hs578T, SKBR7, SUM102PT, SUM1315M02, SUM149PT, SUM159PT, or any combination thereof.

[0053] The data may be subject to one or more analysis or processing steps. The data may be analyzed and/or quantified to identify information or event(s) such as a splicing event. The information or event(s) identified may be statistically significant or specific to one or more diseases, illnesses or conditions. The data analysis or processing may comprise mapping the data to genomes, transcriptomes, or a combination thereof. The data may be processed to remove any information that may not be related to genomes, transcriptomes, or a combination thereof. The data may be processed or analyzed based on one or more predetermined parameters or criteria including, such as types or subtypes of diseases, illnesses, or conditions.

[0054] In cases where a database comprises data associated with different types or subtypes of diseases, illnesses, or conditions, data related to each type or subtype may be analyzed or processed individually to identify information or an event(s) that may be statistically significant or specific to each type or subtype. The identified information or event(s) may be grouped together and compared to one or more controls to determine one or more candidate targets. Alternatively, the information or event(s) identified for each subtype or type may be compared with one another to generate a list of candidate targets. In some cases, the candidate targets comprise information or an event(s) that is identified or shared by at least two different types or subtypes.

[0055] The list of candidate targets may comprise any number of candidate targets, for example, greater than or equal to about 5, 10, 20, 30, 40, 50, 60, 70, 80, 90, 100, 120, 140, 160, 180, 200, 220, 240, 260, 280, 300, 350, 400, 450, 500, or more. In some cases, the list may comprise a number of candidate targets falling between any of the two values described above, for example, about 275.

[0056] At least a portion (e.g., at least about 10%, 20%, 30%, 40%, 50%, 60%, 70%, 80%, 90%, or more) of the candidate targets generated may be subjected to further data analysis or processing. The candidate targets may be arranged in certain order based upon one or more parameters or criteria. The candidate targets may be selected based upon one or more parameters or criteria, thereby generating a refined list of candidate targets. Non-limiting examples of the parameters which may be used to arrange the candidate targets comprise a splicing index, a disease index, a splice-switching oligonucleotides (SSO) druggability index, or any combination thereof.

[0057] The splicing index may be determined based at least in part on factors including e.g., splicing change in a sample (or data) analyzed as compared to a control, consistency and/or reproducibility of a given information or event(s) (e.g., in patient dataset(s)), recurrence of a given information or event(s) in multiple disease datasets, an absence of a given information or event in a normal or control dataset(s). Each factor may be given the same or a different weight in the determination and based on the determination, a score may be generated.

[0058] The disease index may be determined based at least in part on factors including e.g., an impact of a given information or event(s) such as a splice change on function of an expression product(s) such as a protein(s), the degree of association with a disease, illness, or condition, pathway analysis such as pathways listed in kyoto encyclopedia of genes and genomes (KEGG) database, literature evidence, or any combination thereof. Each factor may be given the same or a different weight in the determination and based on the determination, a score may be generated.

[0059] The SSO druggability index may be determined based at least in part on factors including e.g., an ability to identify unique and/or specific splice correcting molecules (e.g., oligo sequence(s)) using AI such as machine learning algorithms, a presence or absence of a strong enhanced cros slinking and immunoprecipitation (eCLIP) peak(s) mapped to the identified target (e.g., an exon(s)), a presence or absence of a disease specific expression of an isoform(s) as compared to the genotype-tissue expression (GTEx) normal data, or any combination thereof. Each factor may be given the same or a different weight in the determination and a score may be generated based on the determination.

[0060] In cases in which a refined list of candidate targets is generated, candidate targets comprised in the list may be subject to additional analysis or processing steps. For example, splicing events associated with at least a subset of the candidate targets may be subjected to an evaluation process. The evaluation process may evaluate for expression at various levels, for example, at the RNA level, at a protein level, or both. The evaluation process may confirm differential isoform expression in samples from different diseases (or subtypes thereof), illnesses, or conditions. Upon confirmation, the candidate targets may be selected and used for further development of therapeutics. In some cases, the selected targets comprise one or more genes. Non-limiting examples of the one or more genes may comprise NEDD4L (ENV2), MAP3K7 (ENV3), NFYA (ENV11), ESYT2 (ENV21), MARK2 (ENV18), ST7 (ENV19), ARVCF (ENV22), SYTL2 (ENV17), R3HDM1 (ENV23), COL4A3BP (ENV9), TANGO2 (ENV6), SEPT9 (ENV15), ROBO1 (ENV4), FAM122B (ENV5), CD47 (ENV13), LSR (ENV20), PBX1 (ENV16), EPB41 (ENV14), ADAM15 (ENV7), EPB41L1 (ENV8), ABI1 (ENV10), FLNB (ENV1), CTNND1 (ENV12), GPR160 (ENV24), ITGB3BP (ENV25), INCENP (ENV26), DENND1B (ENV27), CA12 (ENV28), or any combination thereof.

Modulation of Targets using various Modalities

[0061] In some aspects of the present disclosure, methods and systems for modulating a splicing target(s) are provided. The modulation may comprise modulating a splicing event(s) associated with a target (e.g., a gene). The modulation may comprise promoting or facilitating a splice switching. For example, the modulation may comprise switching pathogenic isoforms to non-pathogenic isoforms.

[0062] The modulation may comprise the use of one or more compositions or molecules which may interact specifically with (e.g., hybridize) a target so as to control or alter splicing of the target or regulate expression of the target at the RNA level, protein level or both. The compositions or molecules may be targeted to any element or combination of elements (e.g., one or more genomic regions within a target) that regulate splicing, including such as the 3 ‘splice site, the 5’ splice site, the branch point, the polypyrimidine tract, exonic splicing enhancers, exonic splicing silencers, intronic splicing enhancers, intronic splicing silencers, or any combination thereof.

[0063] The compositions or molecules may comprise e.g., small molecules, polymers (natural or synthetic), nucleotide sequences such as oligonucleotides or RNAs, a therapeutic agent(s), cells such as CAR-T cells, a protein such as an antibody, or any combination thereof.

[0064] The compositions or molecules may be admixed, encapsulated, conjugated, or otherwise associated with other molecules, molecule structures, or mixtures of compounds, for example liposomes, receptor targeted molecules, oral, rectal, topical or other formulation, for assisting in uptake, distribution, and/or absorption.

[0065] The compositions or molecules may be applied in vivo or ex vivo. To achieve target-specific, or disease-specific targeting, the compositions or molecules may be added at a certain concentration. For example, the compositions or molecules may have a concentration that is less than or equal to about 5 micromolar (μM), 4 μM, 3μM, 2 μM, 1 μM, 900 nanomolar (nM), 800 nM, 700 nM, 650 nM, 600 nM, 550 nM, 500 nM, 450 nM, 400 nM, 350 nM, 300 nM, 250 nM, 200 nM, 150 nM, 100 nM, 50 nM, 10 nM, or less. The concentration may be greater than or equal to about 1 nM, 10 nM, 50 nM, 100 nM, 200 nM, 300 nM, 400 nM, 500 nM, 600 nM, 700 nM, 800 nM, 900 nM, or more. In some cases, the concentration may fall between any two of the values discussed above, for example, about 370 nM or 420 nM.

[0066] In some cases, the compositions or molecules comprise oligonucleotides. The oligonucleotides may comprise any number of nucleotides or nucleotide residues, for example, greater than or equal to about 5, 10, 12, 14, 16, 18, 20, 22, 24, 26, 28, 30, 32, 34, 36, 38, 40, 42, 44, 46, 48, 50, 55, 60 nucleotides or nucleotide residues, or more. In some cases, the oligonucleotides may comprise less than or equal to about 50, 45, 40, 35, 30, 29, 27, 25, 24, 23, 22, 21, 19, 18, 17, 16, 13, 10, 8, 6 nucleotides or nucleotide residues, or less. In some cases, the number of nucleotides or nucleotide residues comprised in the oligonucleotides may fall between any of the values described above, for example, about 16 (16-mer), 17 (17-mer), 18 (18-mer), 19 (19-mer), 20 (20-mer), 21 (16-mer), or 22 (22-mer). In some cases, the oligonucleotides comprise DNA molecules, RNA molecules, or a combination thereof.

[0067] In some cases, the oligonucleotides comprise antisense oligonucleotides. The antisense oligonucleotides may be DNA and/or RNA oligos which are complementary to a given sequence, which given sequence may be a region within a target gene.

[0068] The oligonucleotides may be prepared using various technologies such as solid phase synthesis, the phosphorothioates and/or alkylated derivatives. The nucleotides or nucleotide residues comprised in the oligonucleotides may comprise natural, unmodified nucleotides (e.g., cytosine, guanine, adenine, uracil or thymidine), modified nucleotides, or any combination thereof. In some cases, modified nucleotides or bases are used. The modification may be designed to enhance binding affinity. The modification may comprise chemical modifications. The modification may comprise backbone modifications, sugar ring modifications, or a combination thereof. The sugar ring modifications may comprise 2′-sugar modifications. As an example, an oligonucleotide of the present disclosure may comprise a phosphothioate-modified backbone and/or ribose sugar modified to contain methoxy ethane at 2′-position (2′MOE). The oligonucleotides comprising modified nucleotides or bases may not activate RNase H. In some cases, one or more (e.g., at least about 1, 2, 3, 4, 5, 6, 7, 8, 9, 10, 12, 14, 16, 18, 20, 22, 24, 26, 28, 30, 35, 40, 45, or more) of the inter-nucleotide bridging phosphate residues are modified phosphates, such as methyl phosphonates, methyl phosphonothioates, phosphoromorpholidates, phosphoropiperazidates, phosphoroamidates, or any combination thereof. In some cases, one or more (e.g., at least about 1, 2, 3, 4, 5, 6, 7, 8, 9, 10, 12, 14, 16, 18, 20, 22, 24, 26, 28, 30, 35, 40, 45, or more) of the nucleotides or bases comprise a 2′-alkyl moiety (e.g., C1-C4 alkyl, linear or branched, saturated or unsaturated including e.g., methyl, ethyl, ethenyl, propyl, 1-propenyl, 2-propenyl, isopropyl, or combination or derivative thereof).

[0069] In some cases, the compositions or molecules comprise small molecules. The small molecules may comprise a broad range of chemical compounds that can switch the isoforms of the above-mentioned targets either at the pre-mRNA level or protein level. These compounds may be identified through high-throughput screening approaches using chemical libraries, wherein addition of a compound or a combination of compounds can induce an isoform switch or modulate (e.g., inhibit or enhance) the biological activity of a specific isoform of one or several of the genes (e.g., genes mentioned above or described elsewhere herein) either at the level of RNA or protein or both.

### Application

[0070] The systems and methods of the present disclosure can be used for determining or identifying a novel splicing event(s) or a target (e.g., a gene) to which the novel splicing event is associated with. The novel splicing event(s) may be statistically significant or specific to one or more given types or subtypes of diseases, illnesses or conditions. To identify the novel splicing events, the methods and systems of the present disclosure may receive data from one or more databases, public and/or private, which data may comprise biologically relevant data with respect to the types or subtypes of diseases, illnesses or conditions which are under investigation. The data may be analyzed, processed or annotated. The data analysis, processing, and/or annotation may be conducted using machine learning algorithms. The machine learning may be a supervised learning, an unsupervised learning, or a combination thereof. The algorithm may be a trained algorithm. The algorithm may be trained using a training set. The training set may comprise training samples. The training samples may be cell lines from certain diseases, illnesses, or conditions; samples obtained from subjects having certain diseases, illnesses, or conditions; controls including positive and/or negative controls; or any combination thereof.

[0071] The data analysis, processing, and/or annotation may generate a list of candidate targets which may potentially be used for therapeutic development. Candidate targets comprised in the list may be subjected to further screening process or analyses. Splicing of the candidate targets may be evaluated or validated. The evaluation or validation of the candidate targets may yield a refined list of targets which may be subjected to further therapeutic development.

[0072] Splicing of individual targets comprised in the refined list may be using compositions or molecules. The splicing may be modulated to promote switching of pathogenic isoforms to non-pathogenic isoforms. The compositions or molecules may be designed to target a select region or a combination of select regions within a target to achieve a disease-specific targeting. In some cases, the compositions or molecules are designed to modulate the splicing of two or more (e.g., at least 3 ,4, 5, 6, 7, 8, 9, 10, 11, 12, 13, 14, 15, or more) different targets. Compositions or molecules targeting different targets may be used sequentially, or simultaneously.

[0073] In some aspects of the present disclosure, methods and systems for providing treatment to a subject having or suspected to have a disease, illness, or condition are provided. The methods and systems may comprise obtaining a sample from the subject having or suspected to have a disease, illness, or condition. Biologically relevant data (e.g., DNA, RNA-seq data) may be derived or extracted from the sample. The biologically relevant data may be screened or processed to remove any data unrelated to genome(s) or transcriptome(s). The processed data may be subjected to one or more data analysis, processing or annotation processes which may identify one or more novel splicing events statistically significant or specific to the disease, illness, or condition the subject has or suspected to have. The splicing events identified may be further analyzed or filtered using one or more parameters or filtering criteria, which may generate a final list of splicing events and targets associated therewith for the treatment.

[0074] Upon identification of the targets, the systems and methods may further comprise administering a therapeutically effective amount of compositions or molecules to the subject having or suspected to have the disease, illness, or condition. The administration may be conducted within a given time period. The subject may be monitored, and the amount of the compositions or molecules administered to the subject may be adjusted depending upon, the monitoring results. Additionally, the monitoring may comprise obtaining one or more samples from the subject while the subject is under treatment. The one or more samples may be analyzed or tested to determine if the treatment is effective or not. If a treatment is determined to be ineffective, the treatment may be ceased and/or a different treatment (e.g., administering a different type of compositions or molecules) may be provided.

### EXAMPLES

### Example 1

### Identification of Alternatively Spliced Transcripts in Triple Negative Breast Cancer (TNBC) and Therapeutics to Correct the Splicing Change

[0075] Breast cancer is the most commonly diagnosed cancer and the second leading cause of cancer mortality in women, with nearly 30% of primary disease diagnoses that result in metastatic breast cancer. One of the challenges in breast cancer treatment is to overcome its large heterogeneity and distinct cancer subtypes that may demand differential treatments including chemotherapy, hormonal therapy, and human epidermal growth factor receptor 2 (Her2-) targeted therapy (depending on the subtype). However, a significant number of patients may develop resistance to current standard of care therapies. This stresses the need for identification of novel targets and development of alternative therapies for complete disease remission.

[0076] Splicing errors can be a source of coding variation in breast cancer. Aberrant splicing of several genes may occur even without DNA mutations or epigenetic changes due to mis-regulated expression of splicing factors in breast cancer. Multiple studies have indicated the oncogenic role of core splicing factors such as SRSF1, SRS F2, ESRP1, RBFOX1, etc. in breast cancer. For example, overexpression of SRSF1 may promote transformation of non-cancerous breast epithelial cells. Additionally, it has been suggested that spliceosomal components may be particularly essential factors in TNBC subtype, and the TNBC tumors sometimes show dependency on these factors. As an example, FIG. 1 shows an oncoprint summary of recurring genomic aberration and transcriptional changes for splicing associated RNA binding proteins in the Cancer Genome Atlas (TCGA) breast cancer TNBC subtype patient samples.

[0077] Additionally, splice site mutations that result in expression of alternative isoforms have been reported in key breast cancer genes such as ESR1 encoding estrogen receptor alpha rendering resistance to first line drugs such as Tamoxifen in ER positive breast cancers. Mis-regulation of splicing factors have been shown to contribute to epithelial to mesenchymal switch by the production of mesenchymal isoforms of critical genes such as CD44 and FGFR2, thereby promoting tumor progression and metastasis. Given the suboptimal treatment options available for TNBC patients and the widespread splicing errors observed in TNBC patient RNA-seq data, disease specific alternative splicing can be a source of actionable candidates that can be therapeutically targeted.

[0078] Systems of the present disclosure can be used to discover recurrent splicing changes in TNBC patient RNA-seq and design modalities such as antisense oligonucleotides that target the specific isoforms in order to promote splice-switching to achieve a therapeutic benefit. As discussed above or elsewhere herein, the systems may comprise the SpliceCore® software platform described in International Patent Application No. WO2019/226804, which has been incorporated herein by reference in its entirety. In order to discover splicing changes that occur in TNBC subtypes, RNA-seq data from luminal subtype patients and TNBC subtype patients from TCGA breast cancer datasets are compared using the SpliceCore® software platform. In addition, RNA-sequencing in triplicates on breast cancer cell lines is performed. Two representative luminal cell lines (i.e., MCF7, T47D) and two representative TNBC B subtype cell lines (i.e., HS578T, BT549) and one TNBC A subtype cell line (i.e., MDA-MB 468) are used. A flowchart of the SpliceCore® analysis of the TCGA and the cell line RNA seq data is illustrated in FIG. 2.

[0079] Comparison of the splicing changes between luminal breast cancer and basal breast cancer from TCGA and the cell lines may independently result in an identification of splicing changes that are distinct to TCGA (12,860 changes) and changes that are distinct to cell lines (944 changes) (FIG. 3). Among those changes, there are about 274 splicing changes that are identified in both TCGA and cell lines (FIG. 3). These 274 splicing changes are considered candidates for target selection and may be subject to further analysis. The analysis may be prioritized based on a number of parameters. The parameters (or buckets) for candidate selection may serve as diversified target selection criteria, which may include e.g., a splicing index, a disease index, a therapeutic index, a functional index, a splice-switching oligonucleotide (SSO) druggability index or any combination thereof. Example selection criteria and results are shown in FIG. 17. The figure shows a representative illustration of candidate selection scoring matrix based on different parameters described above.

[0080] The splicing index can score for the splicing change (dPSI) in a given case and a control, consistency, reproducibility of a given event in patient datasets, and recurrence of a given event in multiple disease datasets and absent in normal datasets. The disease index can score for impact of the splicing change on protein function (i.e., “Splicelmpact™”), disease association (integrated through Open Target scores), pathway analysis (KEGG), and literature evidence. The SSO druggability index can score for the ability to identify unique and specific splice correcting oligo sequence using machine learning (i.e., “SpliceLearn™ scores”), presence of strong eCLIP peaks mapped to the identified exons, and disease specific expression of the isoform (comparison with GTex normal data).

[0081] FIG. 18 reveals the identification of biologically relevant targets for the treatment of leukemia as described herein. About 1178 RNA-seq datasets from Acute Myeloid Leukemia (AML) patients obtained from the Leucegene consortium were analyzed to identify potential therapeutic targets. Different approaches were used to analyze alternative splicing events including variance assessment (selection of strongest splicing changes above a cutoff), reproducibility (selection for splicing changes repeatedly observed in biological replicates), cross-validation (splicing changes confirmed in independent dataset(s)), and SpliceCore® (software platform described in International Patent Application No. WO2019/226804, which has been incorporated herein by reference in its entirety). For each approach, the top 30 gene candidates were selected and the gene candidates that were also known to be connected to AML pathogenesis using records from OpenTargets (a public-private partnership using genomics data for drug target identification backed by GSK, Sanofi, Biogen, Takeda, Celgene, EMBL-EBI and Sanger Institute). As shown in FIG. 18, 23 of the top 30 candidates identified by SpliceCore were known to be connected to AML. The other approaches identified few candidates known to be connected to AML: the variance approach identified 10 targets; the reproducibility approach identified 8 targets; and the cros 5-validation approach identified 8 targets.

[0082] In an exemplary application of the selection criteria in FIG. 17, the alternative splicing index is determined by observing one or more alternative splicing event(s)/change(s) in in-house cell lines and public BRCA TCGA RNA-seq data; the therapeutic index is determined by confirming that the one or more alternative splicing event(s)/change(s) is/are disease-specific and is/are not found in normal breast tissues using public GTEx RNA-seq; the functional index is determined by noting that the score(s) for the one or more alternative splicing event(s)/change(s) generated by Splicelmpact (software platform described in International Patent Application No. WO2019/226804, which has been incorporated herein by reference in its entirety) are significantly disruptive; and the druggable index is determined by using SpliceLearn (software platform described in International Patent Application No. WO2019/226804, which has been incorporated herein by reference in its entirety) to predict that the one or more alternative splicing event(s)/change(s) is a drug target. In some cases, the drug target is an SSO modulatory target.

[0083] In an another exemplary application of the selection criteria in FIG. 17, the alternative splicing index is determined by observing one or more alternative splicing event(s)/change(s) in in-house organoids and public BRCA TCGA RNA-seq from the Metabrick dataset; the therapeutic index is determined by confirming that the one or more alternative splicing event(s)/change(s) is/are disease-specific and is/are not found in various post-mortem tissues including liver, heart, muscle and/or kidney, using public GTEx RNA-seq; the functional index is determined by noting that the one or more alternative splicing event(s)/change(s) occur in one or more genes with high BRCA-association scores estimated using OpenTargets; and the druggable index is determined by confirming that binding of one or more oncogenic splicing factors to the one or more target genes with the one or more alternative splicing event(s)/change(s) using CLIP-seq data. In some cases, the one or more target genes may be blocked by ASO based in the selection criteria analyses.

[0084] In an another exemplary application of the selection criteria in FIG. 17, the alternative splicing index is determined by observing one or more alternative splicing event(s)/change(s) in in-house cell lines and licensed RNA-seq from a partner; the therapeutic index is determined by confirming that the one or more alternative splicing event(s)/change(s) is/are disease-specific and is/are not found in normal tissues from partner RNA-seq; the functional index is determined by confirming that the one or more alternative splicing event(s)/change(s) are functionally related breast cancer using public literature; and the druggable index is determined by confirming that one or more alternative splicing event(s)/change(s) occurs in one or more genes that is/are known to be small molecule protein target(s).

[0085] Based on one or more of the above-mentioned filtering criteria or parameters, a total of 28 candidates whose splice changes may be significant in TNBC subtype (Table 1—List of TNBC specific top scoring splicing events and their corresponding gene names) are selected. These candidates' splicing events are subsequently subjected to an evaluation for expression at the level of RNA through PCR in experimental models such as cell lines, primary cells, tissues, organoids, PDX tumors, patient tissue material, body fluids, etc. Wherever antibodies are available, splicing isoforms may also be evaluated for protein expression. Hybridization methods such as RNA-FISH can also be used to validate the specific isoform expression in tumor tissue sections.

TABLE 1

| | Gene | ENV |
|---|---|---|
| TXDBID | (HUGO) | Code |
| CA-18-58335477-58335537.2267.0 | NEDD4L | ENV2 |
| CA-6-90544551-90544632.1 | MAP3K7 | ENV3 |
| CA-6-41080810-41080897.1 | NFYA | ENV11 |
| CA-7-158752780-158752843.1 | ESYT2 | ENV21 |
| CA-11-63903985-63904147.1 | MARK2 | ENV18 |
| CA-7-117134123-117134192.1 | ST7 | ENV19 |
| CA-22-19971215-19971335.1 | ARVCF | ENV22 |
| CA-11-85717482-85717530.1 | SYTL2 | ENV17 |
| CA-2-135641535-135641604.2 | R3HDM1 | ENV23 |
| CA-5-75399309-75399387.1 | COL4A3BP | ENV9 |
| CA-22-20053436-20053551.3 | TANGO2 | ENV6 |
| CA-17-77307140-77307197.5 | SEPT9 | ENV15 |
| CA-3-78647628-78647655.1 | ROBO1 | ENV4 |
| CA-X-134772142-134772283.1 | FAM122B | ENV5 |
| CA-3-58141857-58141929.1 | FLNB | ENV1 |
| CA-3-108050577-108050602.2 | CD47 | ENV13 |
| CA-1-29058588-29058645.2 | EPB41 | ENV14 |
| CA-1-164820071-164820184.1 | PBX1 | ENV16 |
| CA-19-35262545-35262692.1 | LSR | ENV20 |
| CA-1-155061417-155061489.4 | ADAM15 | ENV7 |
| CA-20-36209487-36209898.2 | EPB41L1 | ENV8 |
| CA-10-26755654-26755741.1 | ABI1 | ENV10 |
| CA-11-57791493-57791673.2 | CTNND1 | ENV12 |
| CA-3-170082616-170082758.1 | GPR160 | ENV24 |
| CA-1-63447564-63447614.1 | ITGB3BP | ENV25 |
| CA-11-62141499-62141511.1 | INCENP | ENV26 |
| CA-1-197647054-197647114.1 | DENND1B | ENV27 |
| CA-15-63328097-63328130.1 | CA12 | ENV28 |

[0086] First, reverse transcription polymerase chain reaction (RT-PCR) is performed on selected candidates from the list of Table 1 to confirm the differential isoform expression in luminal versus the basal cell lines. Representative PCRs are shown in FIG. 4 where specific expression of the long or the short isoform is enriched in TNBC cell lines versus luminal cell lines. Further, for a select group of candidates, western blot analysis is also performed to verify the protein expression, and the representative western blot images for those candidates are shown in FIG. 5, which also shows differential isoform expression in protein lysates extracted from luminal and basal cell lines.

[0087] Next, specific candidates are focused on to test to see if they can be used as a good therapeutic target for the development therapeutic compounds. NEDD4L is suggested by the SpliceCore software platform as one of the top candidates and has shown the strongest dPSI change in TCGA data and very high reproducibility, along with known cancer association in a key signaling pathway (i.e., TGFbeta). By studying the impact of the observed splicing changes on protein function, it is determined that the skipping isoform (short isoform) enriched in TNBC subtype lacks a short loop region next to the WW domain which may be responsible for protein-protein interaction. The loop contains a Threonine residue that may undergo post-translational modification by a kinase, which can phosphorylate NEDD4L to maintain the homeostasis of TGFbeta signaling. The TNBC cancer-specific loss of the loop through alternative splicing may deregulate the signaling cascade leading to tumor progression. Additionally, it is observed that breast cancer patients expressing the inclusion isoform of NEDD4L have a better overall survival compared to the breast cancer patients that have the expression of the skipped isoform (FIG. 6). Further analyses of the subtype stratified data from TCGA have shown that the NEDD4L-skipping isoform is significantly enriched in TNBC subtype compared to normal breast or luminal or HER2 subtypes of breast cancer. This difference has been observed only at the level of alternative splicing and there is only a modest difference in the total RNA expression of NEDD4L across these subtypes (FIG. 7).

[0088] By using the SpliceCore® software platform and a module called SpliceLearn, a machine-learning-based (ML-based) approach is used to predict nucleotide sequences with high likelihoods of promoting a splicing switch if blocked using a molecule (e.g., an oligonucleotide). These sequences are scored, and rank-ordered for every exon trio on the candidate list. Additional scoring criteria may include the RBP binding peaks which can be obtained from ENCODE eCLIP-seq data and/or in-house generated eCLIP-seq data for splicing regulatory proteins including but not limited to RBFOX2, TDP-43, HNRNPL.

[0089] Next, a list of k-mer sequences can be generated that span across the high scoring regions within the exon trio and may further be filtered based on SSO specificity, repeat motifs, and off-target effects, and secondary structure (FIG. 8). The top 5 oligos are chemically synthesized and may contain phosphothioate-modified backbone and/or ribose sugar uniformly modified to contain methoxy ethane in 2′ position (2′MOE). Purified oligonucleotides can be subjected to functional assays in breast cancer cell lines.

[0090] For NEDD4L, 5 different sequences (GCTGGCTTTGTCTGGATAGG (SEQ ID NO: 3), GTGGGTTTCAGGGATTCTGA (SEQ ID NO: 1), TCTCACGTCACCTGCCTTAC (SEQ ID NO: 4), AGCGCTGCCACAGCAGTGGG (SEQ ID NO: 5),CCCTGATTCAGACAGCAGGG (SEQ ID NO: 2)) are tested in total, and 2 of those sequences are found to promote the inclusion of the middle exon significantly. GTGGGTTTCAGGGATTCTGA (SEQ ID NO: 1) (SSO2-2) is shown to promote an average of 40% inclusion ratio in 3 out of 4 experiments, and (SSO2-5) CCCTGATTCAGACAGCAGGG (SEQ ID NO: 2) is shown to promote an average of 30% inclusion ratio in 4 out of 4 experiments (FIG. 9).

[0091] Dosage response experiments are performed to evaluate the LC50 value for the SSO compounds in 2 breast cancer cell lines—i.e., the MCF7 (luminal) and MDA-MB-231 (TNBC) cell lines. Transfection of the SSO compounds show a dose responsive loss of viability in the MDA-MB-231 cells and not in the MCF7 cells. The optimal dosing concentration in cell lines is found to be between 370 nM-420 nM where >50% of the cell death has been observed. The cell viability can be evaluated by measuring the mitochondrial ATP flux using the Celltitre glow assay. The mean luminescence can be converted to percentage of viable cells after normalizing to control untransfected cells. The dose response curve for both the SSO on two different cell lines is shown in FIGS. 10A-10B.

[0092] The criticality of alternative splicing events for TNMC tumors are also shown in FIG. 11, FIG. 12, FIG. 13 and FIG. 14. The alternative splicing events may be associated with one or more genes as described above or elsewhere herein, e.g., genes comprising NEDD4L (ENV2), MAP3K7 (ENV3), NFYA (ENV11), ESYT2 (ENV21), MARK2 (ENV18), ST7 (ENV19), ARVCF (ENV22), SYTL2 (ENV17), R3HDM1 (ENV23), COL4A3BP (ENV9), TANGO2 (ENV6), SEPT9 (ENV15), ROBO1 (ENV4), FAM122B (ENV5), CD47 (ENV13), LSR (ENV20), PBX1 (ENV16), EPB41 (ENV14), ADAM15 (ENV7), EPB41L1 (ENV8), ABI1 (ENV10), FLNB (ENV1), CTNND1 (ENV12), GPR160 (ENV24), ITGB3BP (ENV25), INCENP (ENV26), DENND1B (ENV27), CA12 (ENV28), or a combination thereof. Survival analysis of TCGA BRCA patients containing long and short isoforms for candidates is conducted with results illustrated in FIG. 15 and FIG. 16, respectively. The candidates may be one or more genes as described above or elsewhere herein, e.g., genes comprising NEDD4L (ENV2), MAP3K7 (ENV3), NFYA (ENV11), ESYT2 (ENV21), MARK2 (ENV18), ST7 (ENV19), ARVCF (ENV22), SYTL2 (ENV17), R3HDM1 (ENV23), COL4A3BP (ENV9), TANGO2 (ENV6), SEPT9 (ENV15), ROBO1 (ENV4), FAM122B (ENV5), CD47 (ENV13), LSR (ENV20), PBX1 (ENV 16), EPB41 (ENV14), ADAM (ENV7), EPB41L1 (ENV8), ABI1 (ENV10), FLNB (ENV1), CTNND1 (ENV12), GPR160 (ENV24), ITGB3BP (ENV25), INCENP (ENV26), DENND1B (ENV27), CA12 (ENV28), or a combination thereof. The analysis shows significant different in overall survival in patients expressing either of the isoforms.

[0093] Thus, the above results show that TNBC subtype can be vulnerable to splicing changes. Using the software platform of the present disclosure, reproducible and high impact splicing changes can be identified and validated in RNA-seq datasets from patient samples. The candidates listed can potentially serve as a therapeutic target for TNBC breast cancer. The platform has also designed and nominated oligonucleotide sequences that can promote splice switching when targeted using antisense oligos. The platform-designed oligos are experimentally validated for NEDD4L using uniformly modified 2′MOE oligonucleotide chemistry. The NEDD4L alternative splicing is a splicing event specific to TNBC subtype of breast cancer. Targeting NEDD4L isoform switching using modalities such as antisense oligonucleotides exhibits selective viability loss in TNBC cells specifically in a dose responsive manner. As such, NEDD4L splicing can be an actionable event to develop therapeutic to treat TNBC patients.

[0094] It shall be understood that although the above example is related to TNBC RNA-seq datasets, the NEDD4L and other candidate splicing events as discussed above or elsewhere herein can also be important in other solid or hematological malignancies, as well as in neurological or metabolic diseases. One or more of the splicing changes can be responsible for pathogenesis or progression of such diseases, disorders, or conditions, and the therapeutic targeting of the present disclosure can be applied to such diseases, disorders, or conditions.

[0095] Alternatively or additionally, the splicing targets can be modulated using modalities including, but not limited to, small molecules, GAPMER oligonucleotides, siRNAs, CAR-T cells, or any combination thereof to achieve disease-specific targeting. For example, some of the disease-specific splicing events that have been identified can open up grooves for small molecule binding. In such case, small molecules can be designed to target the region that is created because of a splicing change. In another example, splicing changes of the membrane bound proteins can display altered surface epitopes which can be specifically targeted using antibodies. The SpliceCore software platform, and the methods as described above and elsewhere herein, can be used to analyze, design, and develop multimodal therapeutic targets for a wide range of disease indications.

### Example 2

### Target-Specific Anti-Sense Oligonucleotides (ASOs)

[0096] As provided above and elsewhere herein, the ASOs can be identified based on exon position and SpliceLearn^{TM} features such as RNA binding protein. The ASOs can be used for splice switching experiments to promote exon inclusion in the target candidates provided herein. In some cases, chemically-modified ASOs may be synthesized based on the ASOs identified. For example, one or more chemical modifications can be introduced in one or more ASOs. The chemical modification can comprise a phosphorothioate backbone modification and/or 2′-O-(2 Methoxyethyl) ribose modification (2′MOE) (modification of the ribose sugar). Sequences of the ASOs may be used for one or more ex vivo experiments on breast cancer cell lines to determine the effect of the ASOs on splice switching of the target gene candidates.

[0097] A select group of the ASOs may be used for further in vitro and in vivo experiments and preclinical studies. In some instances, the specific splice switching event can be identified to be strongly associated with triple negative breast cancer (TNBC). In some embodiments, the ASOs may have potent splice switching effects with less toxicity. In some cases, the ASOs can be used in preclinical studies and/or in the therapeutic development of targeting of cancer-specific genes in patients. For example, an ASO can be used in the therapeutic development in the targeting of TNBC breast cancer patients by inducing a splice switch that can potentially have an anti-tumor effect.

[0098] Tables 2-8 list example target-specific oligonucleotide sequences of variable sequence lengths which may be used to induce an isoform switch or modulate (e.g., inhibit or enhance) the biological activity of a specific isoform of one or several of the genes described above or elsewhere herein (e.g., genes comprising one or more of NEDD4L (ENV2), MAP3K7 (ENV3), NFYA (ENV11), ESYT2 (ENV21), MARK2 (ENV18), ST7 (ENV19), ARVCF (ENV22), SYTL2 (ENV17), R3HDM1 (ENV23), COL4A3BP (ENV9), TANGO2 (ENV6), SEPT9 (ENV15), ROBO1 (ENV4), FAM122B (ENV5), CD47 (ENV13), LSR (ENV20), PBX1 (ENV16), EPB41 (ENV14), ADAM15 (ENV7), EPB41L1 (ENV8), ABI1 (ENV10), FLNB (ENV1), CTNND1 (ENV12), GPR160 (ENV24), ITGB3BP (ENV25), INCENP (ENV26), DENND1B (ENV27), CA12 (ENV28).

[0099] In some cases, oligonucleotide sequences comprised in a table are specific for a single target. In some cases, oligonucleotide sequences comprised in a table are specific for more than one target. In some cases, oligonucleotide sequences comprised in more than one tables are specific for a single target. For example, oligonucleotide sequences comprised in Tables 2-8 may be specific for a single target. The target may be a gene selected from genes described above or elsewhere herein.

TABLE 2
16-mer target-specific ASOs

| | | | | | | SEQ |
|---|---|---|---|---|---|---|
| CHR | START | END | STRAND | kmer | SEQUENCE | ID NO: |
| chr3 | 58141828 | 58141843 | +/− | 16 | CCCAACTAATCTCCAT | 6 |
| chr3 | 58141829 | 58141844 | +/− | 16 | CCAACTAATCTCCATT | 7 |
| chr3 | 58141830 | 58141845 | +/− | 16 | CAACTAATCTCCATTT | 8 |
| chr3 | 58141831 | 58141846 | +/− | 16 | AACTAATCTCCATTTG | 9 |
| chr3 | 58141832 | 58141847 | +/− | 16 | ACTAATCTCCATTTGC | 10 |
| chr3 | 58141833 | 58141848 | +/− | 16 | CTAATCTCCATTTGCC | 11 |
| chr3 | 58141834 | 58141849 | +/− | 16 | TAATCTCCATTTGCCA | 12 |
| chr3 | 58141835 | 58141850 | +/− | 16 | AATCTCCATTTGCCAC | 13 |
| chr3 | 58141836 | 58141851 | +/− | 16 | ATCTCCATTTGCCACT | 14 |
| chr3 | 58141837 | 58141852 | +/− | 16 | TCTCCATTTGCCACTG | 15 |
| chr3 | 58141838 | 58141853 | +/− | 16 | CTCCATTTGCCACTGA | 16 |
| chr3 | 58141839 | 58141854 | +/− | 16 | TCCATTTGCCACTGAC | 17 |
| chr3 | 58141840 | 58141855 | +/− | 16 | CCATTTGCCACTGACC | 18 |
| chr3 | 58141841 | 58141856 | +/− | 16 | CATTTGCCACTGACCA | 19 |
| chr3 | 58141842 | 58141857 | +/− | 16 | ATTTGCCACTGACCAG | 20 |
| chr3 | 58141843 | 58141858 | +/− | 16 | TTTGCCACTGACCAGG | 21 |
| chr3 | 58141844 | 58141859 | +/− | 16 | TTGCCACTGACCAGGC | 22 |
| chr3 | 58141845 | 58141860 | +/− | 16 | TGCCACTGACCAGGCC | 23 |
| chr3 | 58141846 | 58141861 | +/− | 16 | GCCACTGACCAGGCCA | 24 |
| chr3 | 58141847 | 58141862 | +/− | 16 | CCACTGACCAGGCCAC | 25 |
| chr3 | 58141848 | 58141863 | +/− | 16 | CACTGACCAGGCCACA | 26 |
| chr3 | 58141849 | 58141864 | +/− | 16 | ACTGACCAGGCCACAG | 27 |
| chr3 | 58141850 | 58141865 | +/− | 16 | CTGACCAGGCCACAGA | 28 |
| chr3 | 58141851 | 58141866 | +/− | 16 | TGACCAGGCCACAGAT | 29 |
| chr3 | 58141852 | 58141867 | +/− | 16 | GACCAGGCCACAGATG | 30 |
| chr3 | 58141853 | 58141868 | +/− | 16 | ACCAGGCCACAGATGG | 31 |
| chr3 | 58141854 | 58141869 | +/− | 16 | CCAGGCCACAGATGGG | 32 |
| chr3 | 58141855 | 58141870 | +/− | 16 | CAGGCCACAGATGGGG | 33 |
| chr3 | 58141856 | 58141871 | +/− | 16 | AGGCCACAGATGGGGA | 34 |
| chr3 | 58141857 | 58141872 | +/− | 16 | GGCCACAGATGGGGAA | 35 |
| chr3 | 58141858 | 58141873 | +/− | 16 | GCCACAGATGGGGAAG | 36 |
| chr3 | 58141859 | 58141874 | +/− | 16 | CCACAGATGGGGAAGT | 37 |
| chr3 | 58141860 | 58141875 | +/− | 16 | CACAGATGGGGAAGTC | 38 |
| chr3 | 58141861 | 58141876 | +/− | 16 | ACAGATGGGGAAGTCA | 39 |
| chr3 | 58141862 | 58141877 | +/− | 16 | CAGATGGGGAAGTCAC | 40 |
| chr3 | 58141863 | 58141878 | +/− | 16 | AGATGGGGAAGTCACA | 41 |
| chr3 | 58141864 | 58141879 | +/− | 16 | GATGGGGAAGTCACAG | 42 |
| chr3 | 58141865 | 58141880 | +/− | 16 | ATGGGGAAGTCACAGC | 43 |
| chr3 | 58141866 | 58141881 | +/− | 16 | TGGGGAAGTCACAGCC | 44 |
| chr3 | 58141867 | 58141882 | +/− | 16 | GGGGAAGTCACAGCCG | 45 |
| chr3 | 58141868 | 58141883 | +/− | 16 | GGGAAGTCACAGCCGT | 46 |
| chr3 | 58141869 | 58141884 | +/− | 16 | GGAAGTCACAGCCGTG | 47 |
| chr3 | 58141870 | 58141885 | +/− | 16 | GAAGTCACAGCCGTGG | 48 |
| chr3 | 58141871 | 58141886 | +/− | 16 | AAGTCACAGCCGTGGA | 49 |
| chr3 | 58141872 | 58141887 | +/− | 16 | AGTCACAGCCGTGGAG | 50 |
| chr3 | 58141873 | 58141888 | +/− | 16 | GTCACAGCCGTGGAGG | 51 |
| chr3 | 58141874 | 58141889 | +/− | 16 | TCACAGCCGTGGAGGA | 52 |
| chr3 | 58141875 | 58141890 | +/− | 16 | CACAGCCGTGGAGGAG | 53 |
| chr3 | 58141876 | 58141891 | +/− | 16 | ACAGCCGTGGAGGAGG | 54 |
| chr3 | 58141877 | 58141892 | +/− | 16 | CAGCCGTGGAGGAGGC | 55 |
| chr3 | 58141878 | 58141893 | +/− | 16 | AGCCGTGGAGGAGGCA | 56 |
| chr3 | 58141879 | 58141894 | +/− | 16 | GCCGTGGAGGAGGCAC | 57 |
| chr3 | 58141880 | 58141895 | +/− | 16 | CCGTGGAGGAGGCACC | 58 |
| chr3 | 58141881 | 58141896 | +/− | 16 | CGTGGAGGAGGCACCG | 59 |
| chr3 | 58141882 | 58141897 | +/− | 16 | GTGGAGGAGGCACCGG | 60 |
| chr3 | 58141883 | 58141898 | +/− | 16 | TGGAGGAGGCACCGGT | 61 |
| chr3 | 58141884 | 58141899 | +/− | 16 | GGAGGAGGCACCGGTA | 62 |
| chr3 | 58141885 | 58141900 | +/− | 16 | GAGGAGGCACCGGTAA | 63 |
| chr3 | 58141886 | 58141901 | +/− | 16 | AGGAGGCACCGGTAAA | 64 |
| chr3 | 58141887 | 58141902 | +/− | 16 | GGAGGCACCGGTAAAT | 65 |
| chr3 | 58141888 | 58141903 | +/− | 16 | GAGGCACCGGTAAATG | 66 |
| chr3 | 58141889 | 58141904 | +/− | 16 | AGGCACCGGTAAATGC | 67 |
| chr3 | 58141890 | 58141905 | +/− | 16 | GGCACCGGTAAATGCA | 68 |
| chr3 | 58141891 | 58141906 | +/− | 16 | GCACCGGTAAATGCAT | 69 |
| chr3 | 58141892 | 58141907 | +/− | 16 | CACCGGTAAATGCATG | 70 |
| chr3 | 58141893 | 58141908 | +/− | 16 | ACCGGTAAATGCATGT | 71 |
| chr3 | 58141894 | 58141909 | +/− | 16 | CCGGTAAATGCATGTC | 72 |
| chr3 | 58141895 | 58141910 | +/− | 16 | CGGTAAATGCATGTCC | 73 |
| chr3 | 58141896 | 58141911 | +/− | 16 | GGTAAATGCATGTCCC | 74 |
| chr3 | 58141897 | 58141912 | +/− | 16 | GTAAATGCATGTCCCC | 75 |
| chr3 | 58141898 | 58141913 | +/− | 16 | TAAATGCATGTCCCCC | 76 |
| chr3 | 58141899 | 58141914 | +/− | 16 | AAATGCATGTCCCCCT | 77 |
| chr3 | 58141900 | 58141915 | +/− | 16 | AATGCATGTCCCCCTG | 78 |
| chr3 | 58141901 | 58141916 | +/− | 16 | ATGCATGTCCCCCTGG | 79 |
| chr3 | 58141902 | 58141917 | +/− | 16 | TGCATGTCCCCCTGGA | 80 |
| chr3 | 58141903 | 58141918 | +/− | 16 | GCATGTCCCCCTGGAT | 81 |
| chr3 | 58141904 | 58141919 | +/− | 16 | CATGTCCCCCTGGATT | 82 |
| chr3 | 58141905 | 58141920 | +/− | 16 | ATGTCCCCCTGGATTC | 83 |
| chr3 | 58141906 | 58141921 | +/− | 16 | TGTCCCCCTGGATTCA | 84 |
| chr3 | 58141907 | 58141922 | +/− | 16 | GTCCCCCTGGATTCAG | 85 |
| chr3 | 58141908 | 58141923 | +/− | 16 | TCCCCCTGGATTCAGG | 86 |
| chr3 | 58141909 | 58141924 | +/− | 16 | CCCCCTGGATTCAGGC | 87 |
| chr3 | 58141910 | 58141925 | +/− | 16 | CCCCTGGATTCAGGCC | 88 |
| chr3 | 58141911 | 58141926 | +/− | 16 | CCCTGGATTCAGGCCC | 89 |
| chr3 | 58141912 | 58141927 | +/− | 16 | CCTGGATTCAGGCCCT | 90 |
| chr3 | 58141913 | 58141928 | +/− | 16 | CTGGATTCAGGCCCTG | 91 |
| chr3 | 58141914 | 58141929 | +/− | 16 | TGGATTCAGGCCCTGG | 92 |
| chr3 | 58141915 | 58141930 | +/− | 16 | GGATTCAGGCCCTGGG | 93 |
| chr3 | 58141916 | 58141931 | +/− | 16 | GATTCAGGCCCTGGGT | 94 |
| chr3 | 58141917 | 58141932 | +/− | 16 | ATTCAGGCCCTGGGTA | 95 |
| chr3 | 58141918 | 58141933 | +/− | 16 | TTCAGGCCCTGGGTAC | 96 |
| chr3 | 58141919 | 58141934 | +/− | 16 | TCAGGCCCTGGGTACA | 97 |
| chr3 | 58141920 | 58141935 | +/− | 16 | CAGGCCCTGGGTACAA | 98 |
| chr3 | 58141921 | 58141936 | +/− | 16 | AGGCCCTGGGTACAAT | 99 |
| chr3 | 58141922 | 58141937 | +/− | 16 | GGCCCTGGGTACAATT | 100 |
| chr3 | 58141923 | 58141938 | +/− | 16 | GCCCTGGGTACAATTT | 101 |
| chr3 | 58141924 | 58141939 | +/− | 16 | CCCTGGGTACAATTTT | 102 |
| chr3 | 58141925 | 58141940 | +/− | 16 | CCTGGGTACAATTTTG | 103 |
| chr3 | 58141926 | 58141941 | +/− | 16 | CTGGGTACAATTTTGG | 104 |
| chr3 | 58141927 | 58141942 | +/− | 16 | TGGGTACAATTTTGGT | 105 |
| chr3 | 58141928 | 58141943 | +/− | 16 | GGGTACAATTTTGGTT | 106 |
| chr3 | 58141929 | 58141944 | +/− | 16 | GGTACAATTTTGGTTT | 107 |
| chr3 | 58141930 | 58141945 | +/− | 16 | GTACAATTTTGGTTTT | 108 |
| chr3 | 58141931 | 58141946 | +/− | 16 | TACAATTTTGGTTTTT | 109 |
| chr3 | 58141932 | 58141947 | +/− | 16 | ACAATTTTGGTTTTTT | 110 |
| chr3 | 58141933 | 58141948 | +/− | 16 | CAATTTTGGTTTTTTC | 111 |
| chr3 | 58141934 | 58141949 | +/− | 16 | AATTTTGGTTTTTTCC | 112 |
| chr3 | 58141935 | 58141950 | +/− | 16 | ATTTTGGTTTTTTCCT | 113 |
| chr3 | 58141936 | 58141951 | +/− | 16 | TTTTGGTTTTTTCCTT | 114 |
| chr3 | 58141937 | 58141952 | +/− | 16 | TTTGGTTTTTTCCTTT | 115 |
| chr3 | 58141938 | 58141953 | +/− | 16 | TTGGTTTTTTCCTTTT | 116 |
| chr3 | 58141939 | 58141954 | +/− | 16 | TGGTTTTTTCCTTTTT | 117 |
| chr3 | 58141940 | 58141955 | +/− | 16 | GGTTTTTTCCTTTTTG | 118 |
| chr3 | 58141941 | 58141956 | +/− | 16 | GTTTTTTCCTTTTTGT | 119 |
| chr3 | 58141942 | 58141957 | +/− | 16 | TTTTTTCCTTTTTGTG | 120 |
| chr3 | 58141943 | 58141958 | +/− | 16 | TTTTTCCTTTTTGTGT | 121 |
| chr3 | 58141944 | 58141959 | +/− | 16 | TTTTCCTTTTTGTGTT | 122 |
| chr3 | 58141945 | 58141960 | +/− | 16 | TTTCCTTTTTGTGTTT | 123 |
| chr3 | 58141946 | 58141961 | +/− | 16 | TTCCTTTTTGTGTTTC | 124 |
| chr3 | 58141947 | 58141962 | +/− | 16 | TCCTTTTTGTGTTTCT | 125 |
| chr3 | 58141948 | 58141963 | +/− | 16 | CCTTTTTGTGTTTCTG | 126 |
| chr3 | 58141949 | 58141964 | +/− | 16 | CTTTTTGTGTTTCTGT | 127 |
| chr3 | 58141950 | 58141965 | +/− | 16 | TTTTTGTGTTTCTGTG | 128 |
| chr3 | 58141951 | 58141966 | +/− | 16 | TTTTGTGTTTCTGTGT | 129 |
| chr3 | 58141952 | 58141967 | +/− | 16 | TTTGTGTTTCTGTGTT | 130 |
| chr3 | 58141953 | 58141968 | +/− | 16 | TTGTGTTTCTGTGTTT | 131 |
| chr3 | 58141954 | 58141969 | +/− | 16 | TGTGTTTCTGTGTTTA | 132 |
| chr3 | 58141955 | 58141970 | +/− | 16 | GTGTTTCTGTGTTTAC | 133 |
| chr3 | 58141956 | 58141971 | +/− | 16 | TGTTTCTGTGTTTACT | 134 |
| chr3 | 58141957 | 58141972 | +/− | 16 | GTTTCTGTGTTTACTC | 135 |
| chr3 | 58141958 | 58141973 | +/− | 16 | TTTCTGTGTTTACTCA | 136 |
| chr3 | 58141959 | 58141974 | +/− | 16 | TTCTGTGTTTACTCAG | 137 |
| chr3 | 58141960 | 58141975 | +/− | 16 | TCTGTGTTTACTCAGC | 138 |
| chr3 | 58141961 | 58141976 | +/− | 16 | CTGTGTTTACTCAGCC | 139 |
| chr3 | 58141962 | 58141977 | +/− | 16 | TGTGTTTACTCAGCCT | 140 |
| chr3 | 58141963 | 58141978 | +/− | 16 | GTGTTTACTCAGCCTT | 141 |
| chr3 | 58141964 | 58141979 | +/− | 16 | TGTTTACTCAGCCTTC | 142 |
| chr3 | 58141965 | 58141980 | +/− | 16 | GTTTACTCAGCCTTCA | 143 |
| chr3 | 58141966 | 58141981 | +/− | 16 | TTTACTCAGCCTTCAT | 144 |
| chr3 | 58141967 | 58141982 | +/− | 16 | TTACTCAGCCTTCATT | 145 |
| chr3 | 58141968 | 58141983 | +/− | 16 | TACTCAGCCTTCATTT | 146 |
| chr3 | 58141969 | 58141984 | +/− | 16 | ACTCAGCCTTCATTTC | 147 |
| chr3 | 58141970 | 58141985 | +/− | 16 | CTCAGCCTTCATTTCA | 148 |
| chr3 | 58141971 | 58141986 | +/− | 16 | TCAGCCTTCATTTCAG | 149 |
| chr3 | 58141972 | 58141987 | +/− | 16 | CAGCCTTCATTTCAGA | 150 |
| chr3 | 58141973 | 58141988 | +/− | 16 | AGCCTTCATTTCAGAA | 151 |
| chr3 | 58141974 | 58141989 | +/− | 16 | GCCTTCATTTCAGAAA | 152 |
| chr3 | 58141975 | 58141990 | +/− | 16 | CCTTCATTTCAGAAAA | 153 |
| chr3 | 58141976 | 58141991 | +/− | 16 | CTTCATTTCAGAAAAT | 154 |
| chr3 | 58141977 | 58141992 | +/− | 16 | TTCATTTCAGAAAATC | 155 |
| chr3 | 58141978 | 58141993 | +/− | 16 | TCATTTCAGAAAATCT | 156 |
| chr3 | 58141979 | 58141994 | +/− | 16 | CATTTCAGAAAATCTG | 157 |
| chr3 | 58141980 | 58141995 | +/− | 16 | ATTTCAGAAAATCTGC | 158 |
| chr3 | 58141981 | 58141996 | +/− | 16 | TTTCAGAAAATCTGCC | 159 |
| chr3 | 58141982 | 58141997 | +/− | 16 | TTCAGAAAATCTGCCA | 160 |
| chr3 | 58141983 | 58141998 | +/− | 16 | TCAGAAAATCTGCCAT | 161 |
| chr3 | 58141984 | 58141999 | +/− | 16 | CAGAAAATCTGCCATC | 162 |
| chr3 | 58141985 | 58142000 | +/− | 16 | AGAAAATCTGCCATCT | 163 |
| chr3 | 58141986 | 58142001 | +/− | 16 | GAAAATCTGCCATCTG | 164 |
| chr3 | 58141987 | 58142002 | +/− | 16 | AAAATCTGCCATCTGC | 165 |
| chr3 | 58141988 | 58142003 | +/− | 16 | AAATCTGCCATCTGCT | 166 |
| chr3 | 58141989 | 58142004 | +/− | 16 | AATCTGCCATCTGCTT | 167 |
| chr3 | 58141990 | 58142005 | +/− | 16 | ATCTGCCATCTGCTTC | 168 |
| chr3 | 58141991 | 58142006 | +/− | 16 | TCTGCCATCTGCTTCT | 169 |
| chr3 | 58141992 | 58142007 | +/− | 16 | CTGCCATCTGCTTCTG | 170 |
| chr3 | 58141993 | 58142008 | +/− | 16 | TGCCATCTGCTTCTGG | 171 |
| chr3 | 58141994 | 58142009 | +/− | 16 | GCCATCTGCTTCTGGG | 172 |
| chr3 | 58141995 | 58142010 | +/− | 16 | CCATCTGCTTCTGGGA | 173 |
| chr3 | 58141996 | 58142011 | +/− | 16 | CATCTGCTTCTGGGAT | 174 |
| chr3 | 58141997 | 58142012 | +/− | 16 | ATCTGCTTCTGGGATT | 175 |
| chr3 | 58141998 | 58142013 | +/− | 16 | TCTGCTTCTGGGATTG | 176 |
| chr3 | 58141999 | 58142014 | +/− | 16 | CTGCTTCTGGGATTGC | 177 |
| chr3 | 58142000 | 58142015 | +/− | 16 | TGCTTCTGGGATTGCT | 178 |
| chr3 | 58142001 | 58142016 | +/− | 16 | GCTTCTGGGATTGCTT | 179 |
| chr3 | 58142002 | 58142017 | +/− | 16 | CTTCTGGGATTGCTTA | 180 |
| chr3 | 58142003 | 58142018 | +/− | 16 | TTCTGGGATTGCTTAA | 181 |
| chr3 | 58142004 | 58142019 | +/− | 16 | TCTGGGATTGCTTAAG | 182 |
| chr3 | 58142005 | 58142020 | +/− | 16 | CTGGGATTGCTTAAGC | 183 |
| chr3 | 58142006 | 58142021 | +/− | 16 | TGGGATTGCTTAAGCC | 184 |
| chr3 | 58142007 | 58142022 | +/− | 16 | GGGATTGCTTAAGCCC | 185 |
| chr3 | 58142008 | 58142023 | +/− | 16 | GGATTGCTTAAGCCCT | 186 |
| chr3 | 58142009 | 58142024 | +/− | 16 | GATTGCTTAAGCCCTG | 187 |
| chr3 | 58142010 | 58142025 | +/− | 16 | ATTGCTTAAGCCCTGT | 188 |
| chr3 | 58142011 | 58142026 | +/− | 16 | TTGCTTAAGCCCTGTG | 189 |
| chr3 | 58142012 | 58142027 | +/− | 16 | TGCTTAAGCCCTGTGG | 190 |
| chr3 | 58142013 | 58142028 | +/− | 16 | GCTTAAGCCCTGTGGG | 191 |
| chr3 | 58142014 | 58142029 | +/− | 16 | CTTAAGCCCTGTGGGT | 192 |
| chr3 | 58142015 | 58142030 | +/− | 16 | TTAAGCCCTGTGGGTG | 193 |
| chr3 | 58142016 | 58142031 | +/− | 16 | TAAGCCCTGTGGGTGT | 194 |
| chr3 | 58142017 | 58142032 | +/− | 16 | AAGCCCTGTGGGTGTC | 195 |
| chr3 | 58142018 | 58142033 | +/− | 16 | AGCCCTGTGGGTGTCC | 196 |
| chr3 | 58142019 | 58142034 | +/− | 16 | GCCCTGTGGGTGTCCT | 197 |
| chr3 | 58142020 | 58142035 | +/− | 16 | CCCTGTGGGTGTCCTG | 198 |
| chr3 | 58142021 | 58142036 | +/− | 16 | CCTGTGGGTGTCCTGG | 199 |
| chr3 | 58142022 | 58142037 | +/− | 16 | CTGTGGGTGTCCTGGT | 200 |
| chr3 | 58142023 | 58142038 | +/− | 16 | TGTGGGTGTCCTGGTC | 201 |
| chr3 | 58142024 | 58142039 | +/− | 16 | GTGGGTGTCCTGGTCA | 202 |
| chr3 | 58142025 | 58142040 | +/− | 16 | TGGGTGTCCTGGTCAT | 203 |
| chr3 | 58142026 | 58142041 | +/− | 16 | GGGTGTCCTGGTCATT | 204 |
| chr3 | 58142027 | 58142042 | +/− | 16 | GGTGTCCTGGTCATTG | 205 |
| chr3 | 58142028 | 58142043 | +/− | 16 | GTGTCCTGGTCATTGG | 206 |
| chr3 | 58142029 | 58142044 | +/− | 16 | TGTCCTGGTCATTGGT | 207 |

TABLE 3
17-mer target-specific ASOs

| | | | | | | SEQ |
|---|---|---|---|---|---|---|
| | | | | | | ID |
| CHR | START | END | STRAND | kmer | SEQUENCE | NO: |
| chr3 | 58141828 | 58141844 | +/− | 17 | CCCAACTAATCTCCATT | 208 |
| chr3 | 58141829 | 58141845 | +/− | 17 | CCAACTAATCTCCATTT | 209 |
| chr3 | 58141830 | 58141846 | +/− | 17 | CAACTAATCTCCATTTG | 210 |
| chr3 | 58141831 | 58141847 | +/− | 17 | AACTAATCTCCATTTGC | 211 |
| chr3 | 58141832 | 58141848 | +/− | 17 | ACTAATCTCCATTTGCC | 212 |
| chr3 | 58141833 | 58141849 | +/− | 17 | CTAATCTCCATTTGCCA | 213 |
| chr3 | 58141834 | 58141850 | +/− | 17 | TAATCTCCATTTGCCAC | 214 |
| chr3 | 58141835 | 58141851 | +/− | 17 | AATCTCCATTTGCCACT | 215 |
| chr3 | 58141836 | 58141852 | +/− | 17 | ATCTCCATTTGCCACTG | 216 |
| chr3 | 58141837 | 58141853 | +/− | 17 | TCTCCATTTGCCACTGA | 217 |
| chr3 | 58141838 | 58141854 | +/− | 17 | CTCCATTTGCCACTGAC | 218 |
| chr3 | 58141839 | 58141855 | +/− | 17 | TCCATTTGCCACTGACC | 219 |
| chr3 | 58141840 | 58141856 | +/− | 17 | CCATTTGCCACTGACCA | 220 |
| chr3 | 58141841 | 58141857 | +/− | 17 | CATTTGCCACTGACCAG | 221 |
| chr3 | 58141842 | 58141858 | +/− | 17 | ATTTGCCACTGACCAGG | 222 |
| chr3 | 58141843 | 58141859 | +/− | 17 | TTTGCCACTGACCAGGC | 223 |
| chr3 | 58141844 | 58141860 | +/− | 17 | TTGCCACTGACCAGGCC | 224 |
| chr3 | 58141845 | 58141861 | +/− | 17 | TGCCACTGACCAGGCCA | 225 |
| chr3 | 58141846 | 58141862 | +/− | 17 | GCCACTGACCAGGCCAC | 226 |
| chr3 | 58141847 | 58141863 | +/− | 17 | CCACTGACCAGGCCACA | 227 |
| chr3 | 58141848 | 58141864 | +/− | 17 | CACTGACCAGGCCACAG | 228 |
| chr3 | 58141849 | 58141865 | +/− | 17 | ACTGACCAGGCCACAGA | 229 |
| chr3 | 58141850 | 58141866 | +/− | 17 | CTGACCAGGCCACAGAT | 230 |
| chr3 | 58141851 | 58141867 | +/− | 17 | TGACCAGGCCACAGATG | 231 |
| chr3 | 58141852 | 58141868 | +/− | 17 | GACCAGGCCACAGATGG | 232 |
| chr3 | 58141853 | 58141869 | +/− | 17 | ACCAGGCCACAGATGGG | 233 |
| chr3 | 58141854 | 58141870 | +/− | 17 | CCAGGCCACAGATGGGG | 234 |
| chr3 | 58141855 | 58141871 | +/− | 17 | CAGGCCACAGATGGGGA | 235 |
| chr3 | 58141856 | 58141872 | +/− | 17 | AGGCCACAGATGGGGAA | 236 |
| chr3 | 58141857 | 58141873 | +/− | 17 | GGCCACAGATGGGGAAG | 237 |
| chr3 | 58141858 | 58141874 | +/− | 17 | GCCACAGATGGGGAAGT | 238 |
| chr3 | 58141859 | 58141875 | +/− | 17 | CCACAGATGGGGAAGTC | 239 |
| chr3 | 58141860 | 58141876 | +/− | 17 | CACAGATGGGGAAGTCA | 240 |
| chr3 | 58141861 | 58141877 | +/− | 17 | ACAGATGGGGAAGTCAC | 241 |
| chr3 | 58141862 | 58141878 | +/− | 17 | CAGATGGGGAAGTCACA | 242 |
| chr3 | 58141863 | 58141879 | +/− | 17 | AGATGGGGAAGTCACAG | 243 |
| chr3 | 58141864 | 58141880 | +/− | 17 | GATGGGGAAGTCACAGC | 244 |
| chr3 | 58141865 | 58141881 | +/− | 17 | ATGGGGAAGTCACAGCC | 245 |
| chr3 | 58141866 | 58141882 | +/− | 17 | TGGGGAAGTCACAGCCG | 246 |
| chr3 | 58141867 | 58141883 | +/− | 17 | GGGGAAGTCACAGCCGT | 247 |
| chr3 | 58141868 | 58141884 | +/− | 17 | GGGAAGTCACAGCCGTG | 248 |
| chr3 | 58141869 | 58141885 | +/− | 17 | GGAAGTCACAGCCGTGG | 249 |
| chr3 | 58141870 | 58141886 | +/− | 17 | GAAGTCACAGCCGTGGA | 250 |
| chr3 | 58141871 | 58141887 | +/− | 17 | AAGTCACAGCCGTGGAG | 251 |
| chr3 | 58141872 | 58141888 | +/− | 17 | AGTCACAGCCGTGGAGG | 252 |
| chr3 | 58141873 | 58141889 | +/− | 17 | GTCACAGCCGTGGAGGA | 253 |
| chr3 | 58141874 | 58141890 | +/− | 17 | TCACAGCCGTGGAGGAG | 254 |
| chr3 | 58141875 | 58141891 | +/− | 17 | CACAGCCGTGGAGGAGG | 255 |
| chr3 | 58141876 | 58141892 | +/− | 17 | ACAGCCGTGGAGGAGGC | 256 |
| chr3 | 58141877 | 58141893 | +/− | 17 | CAGCCGTGGAGGAGGCA | 257 |
| chr3 | 58141878 | 58141894 | +/− | 17 | AGCCGTGGAGGAGGCAC | 258 |
| chr3 | 58141879 | 58141895 | +/− | 17 | GCCGTGGAGGAGGCACC | 259 |
| chr3 | 58141880 | 58141896 | +/− | 17 | CCGTGGAGGAGGCACCG | 260 |
| chr3 | 58141881 | 58141897 | +/− | 17 | CGTGGAGGAGGCACCGG | 261 |
| chr3 | 58141882 | 58141898 | +/− | 17 | GTGGAGGAGGCACCGGT | 262 |
| chr3 | 58141883 | 58141899 | +/− | 17 | TGGAGGAGGCACCGGTA | 263 |
| chr3 | 58141884 | 58141900 | +/− | 17 | GGAGGAGGCACCGGTAA | 264 |
| chr3 | 58141885 | 58141901 | +/− | 17 | GAGGAGGCACCGGTAAA | 265 |
| chr3 | 58141886 | 58141902 | +/− | 17 | AGGAGGCACCGGTAAAT | 266 |
| chr3 | 58141887 | 58141903 | +/− | 17 | GGAGGCACCGGTAAATG | 267 |
| chr3 | 58141888 | 58141904 | +/− | 17 | GAGGCACCGGTAAATGC | 268 |
| chr3 | 58141889 | 58141905 | +/− | 17 | AGGCACCGGTAAATGCA | 269 |
| chr3 | 58141890 | 58141906 | +/− | 17 | GGCACCGGTAAATGCAT | 270 |
| chr3 | 58141891 | 58141907 | +/− | 17 | GCACCGGTAAATGCATG | 271 |
| chr3 | 58141892 | 58141908 | +/− | 17 | CACCGGTAAATGCATGT | 272 |
| chr3 | 58141893 | 58141909 | +/− | 17 | ACCGGTAAATGCATGTC | 273 |
| chr3 | 58141894 | 58141910 | +/− | 17 | CCGGTAAATGCATGTCC | 274 |
| chr3 | 58141895 | 58141911 | +/− | 17 | CGGTAAATGCATGTCCC | 275 |
| chr3 | 58141896 | 58141912 | +/− | 17 | GGTAAATGCATGTCCCC | 276 |
| chr3 | 58141897 | 58141913 | +/− | 17 | GTAAATGCATGTCCCCC | 277 |
| chr3 | 58141898 | 58141914 | +/− | 17 | TAAATGCATGTCCCCCT | 278 |
| chr3 | 58141899 | 58141915 | +/− | 17 | AAATGCATGTCCCCCTG | 279 |
| chr3 | 58141900 | 58141916 | +/− | 17 | AATGCATGTCCCCCTGG | 280 |
| chr3 | 58141901 | 58141917 | +/− | 17 | ATGCATGTCCCCCTGGA | 281 |
| chr3 | 58141902 | 58141918 | +/− | 17 | TGCATGTCCCCCTGGAT | 282 |
| chr3 | 58141903 | 58141919 | +/− | 17 | GCATGTCCCCCTGGATT | 283 |
| chr3 | 58141904 | 58141920 | +/− | 17 | CATGTCCCCCTGGATTC | 284 |
| chr3 | 58141905 | 58141921 | +/− | 17 | ATGTCCCCCTGGATTCA | 285 |
| chr3 | 58141906 | 58141922 | +/− | 17 | TGTCCCCCTGGATTCAG | 286 |
| chr3 | 58141907 | 58141923 | +/− | 17 | GTCCCCCTGGATTCAGG | 287 |
| chr3 | 58141908 | 58141924 | +/− | 17 | TCCCCCTGGATTCAGGC | 288 |
| chr3 | 58141909 | 58141925 | +/− | 17 | CCCCCTGGATTCAGGCC | 289 |
| chr3 | 58141910 | 58141926 | +/− | 17 | CCCCTGGATTCAGGCCC | 290 |
| chr3 | 58141911 | 58141927 | +/− | 17 | CCCTGGATTCAGGCCCT | 291 |
| chr3 | 58141912 | 58141928 | +/− | 17 | CCTGGATTCAGGCCCTG | 292 |
| chr3 | 58141913 | 58141929 | +/− | 17 | CTGGATTCAGGCCCTGG | 293 |
| chr3 | 58141914 | 58141930 | +/− | 17 | TGGATTCAGGCCCTGGG | 294 |
| chr3 | 58141915 | 58141931 | +/− | 17 | GGATTCAGGCCCTGGGT | 295 |
| chr3 | 58141916 | 58141932 | +/− | 17 | GATTCAGGCCCTGGGTA | 296 |
| chr3 | 58141917 | 58141933 | +/− | 17 | ATTCAGGCCCTGGGTAC | 297 |
| chr3 | 58141918 | 58141934 | +/− | 17 | TTCAGGCCCTGGGTACA | 298 |
| chr3 | 58141919 | 58141935 | +/− | 17 | TCAGGCCCTGGGTACAA | 299 |
| chr3 | 58141920 | 58141936 | +/− | 17 | CAGGCCCTGGGTACAAT | 300 |
| chr3 | 58141921 | 58141937 | +/− | 17 | AGGCCCTGGGTACAATT | 301 |
| chr3 | 58141922 | 58141938 | +/− | 17 | GGCCCTGGGTACAATTT | 302 |
| chr3 | 58141923 | 58141939 | +/− | 17 | GCCCTGGGTACAATTTT | 303 |
| chr3 | 58141924 | 58141940 | +/− | 17 | CCCTGGGTACAATTTTG | 304 |
| chr3 | 58141925 | 58141941 | +/− | 17 | CCTGGGTACAATTTTGG | 305 |
| chr3 | 58141926 | 58141942 | +/− | 17 | CTGGGTACAATTTTGGT | 306 |
| chr3 | 58141927 | 58141943 | +/− | 17 | TGGGTACAATTTTGGTT | 307 |
| chr3 | 58141928 | 58141944 | +/− | 17 | GGGTACAATTTTGGTTT | 308 |
| chr3 | 58141929 | 58141945 | +/− | 17 | GGTACAATTTTGGTTTT | 309 |
| chr3 | 58141930 | 58141946 | +/− | 17 | GTACAATTTTGGTTTTT | 310 |
| chr3 | 58141931 | 58141947 | +/− | 17 | TACAATTTTGGTTTTTT | 311 |
| chr3 | 58141932 | 58141948 | +/− | 17 | ACAATTTTGGTTTTTTC | 312 |
| chr3 | 58141933 | 58141949 | +/− | 17 | CAATTTTGGTTTTTTCC | 313 |
| chr3 | 58141934 | 58141950 | +/− | 17 | AATTTTGGTTTTTTCCT | 314 |
| chr3 | 58141935 | 58141951 | +/− | 17 | ATTTTGGTTTTTTCCTT | 315 |
| chr3 | 58141936 | 58141952 | +/− | 17 | TTTTGGTTTTTTCCTTT | 316 |
| chr3 | 58141937 | 58141953 | +/− | 17 | TTTGGTTTTTTCCTTTT | 317 |
| chr3 | 58141938 | 58141954 | +/− | 17 | TTGGTTTTTTCCTTTTT | 318 |
| chr3 | 58141939 | 58141955 | +/− | 17 | TGGTTTTTTCCTTTTTG | 319 |
| chr3 | 58141940 | 58141956 | +/− | 17 | GGTTTTTTCCTTTTTGT | 320 |
| chr3 | 58141941 | 58141957 | +/− | 17 | GTTTTTTCCTTTTTGTG | 321 |
| chr3 | 58141942 | 58141958 | +/− | 17 | TTTTTTCCTTTTTGTGT | 322 |
| chr3 | 58141943 | 58141959 | +/− | 17 | TTTTTCCTTTTTGTGTT | 323 |
| chr3 | 58141944 | 58141960 | +/− | 17 | TTTTCCTTTTTGTGTTT | 324 |
| chr3 | 58141945 | 58141961 | +/− | 17 | TTTCCTTTTTGTGTTTC | 325 |
| chr3 | 58141946 | 58141962 | +/− | 17 | TTCCTTTTTGTGTTTCT | 326 |
| chr3 | 58141947 | 58141963 | +/− | 17 | TCCTTTTTGTGTTTCTG | 327 |
| chr3 | 58141948 | 58141964 | +/− | 17 | CCTTTTTGTGTTTCTGT | 328 |
| chr3 | 58141949 | 58141965 | +/− | 17 | CTTTTTGTGTTTCTGTG | 329 |
| chr3 | 58141950 | 58141966 | +/− | 17 | TTTTTGTGTTTCTGTGT | 330 |
| chr3 | 58141951 | 58141967 | +/− | 17 | TTTTGTGTTTCTGTGTT | 331 |
| chr3 | 58141952 | 58141968 | +/− | 17 | TTTGTGTTTCTGTGTTT | 332 |
| chr3 | 58141953 | 58141969 | +/− | 17 | TTGTGTTTCTGTGTTTA | 333 |
| chr3 | 58141954 | 58141970 | +/− | 17 | TGTGTTTCTGTGTTTAC | 334 |
| chr3 | 58141955 | 58141971 | +/− | 17 | GTGTTTCTGTGTTTACT | 335 |
| chr3 | 58141956 | 58141972 | +/− | 17 | TGTTTCTGTGTTTACTC | 336 |
| chr3 | 58141957 | 58141973 | +/− | 17 | GTTTCTGTGTTTACTCA | 337 |
| chr3 | 58141958 | 58141974 | +/− | 17 | TTTCTGTGTTTACTCAG | 338 |
| chr3 | 58141959 | 58141975 | +/− | 17 | TTCTGTGTTTACTCAGC | 339 |
| chr3 | 58141960 | 58141976 | +/− | 17 | TCTGTGTTTACTCAGCC | 340 |
| chr3 | 58141961 | 58141977 | +/− | 17 | CTGTGTTTACTCAGCCT | 341 |
| chr3 | 58141962 | 58141978 | +/− | 17 | TGTGTTTACTCAGCCTT | 342 |
| chr3 | 58141963 | 58141979 | +/− | 17 | GTGTTTACTCAGCCTTC | 343 |
| chr3 | 58141964 | 58141980 | +/− | 17 | TGTTTACTCAGCCTTCA | 344 |
| chr3 | 58141965 | 58141981 | +/− | 17 | GTTTACTCAGCCTTCAT | 345 |
| chr3 | 58141966 | 58141982 | +/− | 17 | TTTACTCAGCCTTCATT | 346 |
| chr3 | 58141967 | 58141983 | +/− | 17 | TTACTCAGCCTTCATTT | 347 |
| chr3 | 58141968 | 58141984 | +/− | 17 | TACTCAGCCTTCATTTC | 348 |
| chr3 | 58141969 | 58141985 | +/− | 17 | ACTCAGCCTTCATTTCA | 349 |
| chr3 | 58141970 | 58141986 | +/− | 17 | CTCAGCCTTCATTTCAG | 350 |
| chr3 | 58141971 | 58141987 | +/− | 17 | TCAGCCTTCATTTCAGA | 351 |
| chr3 | 58141972 | 58141988 | +/− | 17 | CAGCCTTCATTTCAGAA | 352 |
| chr3 | 58141973 | 58141989 | +/− | 17 | AGCCTTCATTTCAGAAA | 353 |
| chr3 | 58141974 | 58141990 | +/− | 17 | GCCTTCATTTCAGAAAA | 354 |
| chr3 | 58141975 | 58141991 | +/− | 17 | CCTTCATTTCAGAAAAT | 355 |
| chr3 | 58141976 | 58141992 | +/− | 17 | CTTCATTTCAGAAAATC | 356 |
| chr3 | 58141977 | 58141993 | +/− | 17 | TTCATTTCAGAAAATCT | 357 |
| chr3 | 58141978 | 58141994 | +/− | 17 | TCATTTCAGAAAATCTG | 358 |
| chr3 | 58141979 | 58141995 | +/− | 17 | CATTTCAGAAAATCTGC | 359 |
| chr3 | 58141980 | 58141996 | +/− | 17 | ATTTCAGAAAATCTGCC | 360 |
| chr3 | 58141981 | 58141997 | +/− | 17 | TTTCAGAAAATCTGCCA | 361 |
| chr3 | 58141982 | 58141998 | +/− | 17 | TTCAGAAAATCTGCCAT | 362 |
| chr3 | 58141983 | 58141999 | +/− | 17 | TCAGAAAATCTGCCATC | 363 |
| chr3 | 58141984 | 58142000 | +/− | 17 | CAGAAAATCTGCCATCT | 364 |
| chr3 | 58141985 | 58142001 | +/− | 17 | AGAAAATCTGCCATCTG | 365 |
| chr3 | 58141986 | 58142002 | +/− | 17 | GAAAATCTGCCATCTGC | 366 |
| chr3 | 58141987 | 58142003 | +/− | 17 | AAAATCTGCCATCTGCT | 367 |
| chr3 | 58141988 | 58142004 | +/− | 17 | AAATCTGCCATCTGCTT | 368 |
| chr3 | 58141989 | 58142005 | +/− | 17 | AATCTGCCATCTGCTTC | 369 |
| chr3 | 58141990 | 58142006 | +/− | 17 | ATCTGCCATCTGCTTCT | 370 |
| chr3 | 58141991 | 58142007 | +/− | 17 | TCTGCCATCTGCTTCTG | 371 |
| chr3 | 58141992 | 58142008 | +/− | 17 | CTGCCATCTGCTTCTGG | 372 |
| chr3 | 58141993 | 58142009 | +/− | 17 | TGCCATCTGCTTCTGGG | 373 |
| chr3 | 58141994 | 58142010 | +/− | 17 | GCCATCTGCTTCTGGGA | 374 |
| chr3 | 58141995 | 58142011 | +/− | 17 | CCATCTGCTTCTGGGAT | 375 |
| chr3 | 58141996 | 58142012 | +/− | 17 | CATCTGCTTCTGGGATT | 376 |
| chr3 | 58141997 | 58142013 | +/− | 17 | ATCTGCTTCTGGGATTG | 377 |
| chr3 | 58141998 | 58142014 | +/− | 17 | TCTGCTTCTGGGATTGC | 378 |
| chr3 | 58141999 | 58142015 | +/− | 17 | CTGCTTCTGGGATTGCT | 379 |
| chr3 | 58142000 | 58142016 | +/− | 17 | TGCTTCTGGGATTGCTT | 380 |
| chr3 | 58142001 | 58142017 | +/− | 17 | GCTTCTGGGATTGCTTA | 381 |
| chr3 | 58142002 | 58142018 | +/− | 17 | CTTCTGGGATTGCTTAA | 382 |
| chr3 | 58142003 | 58142019 | +/− | 17 | TTCTGGGATTGCTTAAG | 383 |
| chr3 | 58142004 | 58142020 | +/− | 17 | TCTGGGATTGCTTAAGC | 384 |
| chr3 | 58142005 | 58142021 | +/− | 17 | CTGGGATTGCTTAAGCC | 385 |
| chr3 | 58142006 | 58142022 | +/− | 17 | TGGGATTGCTTAAGCCC | 386 |
| chr3 | 58142007 | 58142023 | +/− | 17 | GGGATTGCTTAAGCCCT | 387 |
| chr3 | 58142008 | 58142024 | +/− | 17 | GGATTGCTTAAGCCCTG | 388 |
| chr3 | 58142009 | 58142025 | +/− | 17 | GATTGCTTAAGCCCTGT | 389 |
| chr3 | 58142010 | 58142026 | +/− | 17 | ATTGCTTAAGCCCTGTG | 390 |
| chr3 | 58142011 | 58142027 | +/− | 17 | TTGCTTAAGCCCTGTGG | 391 |
| chr3 | 58142012 | 58142028 | +/− | 17 | TGCTTAAGCCCTGTGGG | 392 |
| chr3 | 58142013 | 58142029 | +/− | 17 | GCTTAAGCCCTGTGGGT | 393 |
| chr3 | 58142014 | 58142030 | +/− | 17 | CTTAAGCCCTGTGGGTG | 394 |
| chr3 | 58142015 | 58142031 | +/− | 17 | TTAAGCCCTGTGGGTGT | 395 |
| chr3 | 58142016 | 58142032 | +/− | 17 | TAAGCCCTGTGGGTGTC | 396 |
| chr3 | 58142017 | 58142033 | +/− | 17 | AAGCCCTGTGGGTGTCC | 397 |
| chr3 | 58142018 | 58142034 | +/− | 17 | AGCCCTGTGGGTGTCCT | 398 |
| chr3 | 58142019 | 58142035 | +/− | 17 | GCCCTGTGGGTGTCCTG | 399 |
| chr3 | 58142020 | 58142036 | +/− | 17 | CCCTGTGGGTGTCCTGG | 400 |
| chr3 | 58142021 | 58142037 | +/− | 17 | CCTGTGGGTGTCCTGGT | 401 |
| chr3 | 58142022 | 58142038 | +/− | 17 | CTGTGGGTGTCCTGGTC | 402 |
| chr3 | 58142023 | 58142039 | +/− | 17 | TGTGGGTGTCCTGGTCA | 403 |
| chr3 | 58142024 | 58142040 | +/− | 17 | GTGGGTGTCCTGGTCAT | 404 |
| chr3 | 58142025 | 58142041 | +/− | 17 | TGGGTGTCCTGGTCATT | 405 |
| chr3 | 58142026 | 58142042 | +/− | 17 | GGGTGTCCTGGTCATTG | 406 |
| chr3 | 58142027 | 58142043 | +/− | 17 | GGTGTCCTGGTCATTGG | 407 |
| chr3 | 58142028 | 58142044 | +/− | 17 | GTGTCCTGGTCATTGGT | 408 |

TABLE 4
18-mer target-specific ASOs

| | | | | | | SEQ |
|---|---|---|---|---|---|---|
| | | | | | | ID |
| CHR | START | END | STRAND | kmer | SEQUENCE | NO: |
| chr3 | 58141828 | 58141845 | +/− | 18 | CCCAACTAATCTCCATTT | 409 |
| chr3 | 58141829 | 58141846 | +/− | 18 | CCAACTAATCTCCATTTG | 410 |
| chr3 | 58141830 | 58141847 | +/− | 18 | CAACTAATCTCCATTTGC | 411 |
| chr3 | 58141831 | 58141848 | +/− | 18 | AACTAATCTCCATTTGCC | 412 |
| chr3 | 58141832 | 58141849 | +/− | 18 | ACTAATCTCCATTTGCCA | 413 |
| chr3 | 58141833 | 58141850 | +/− | 18 | CTAATCTCCATTTGCCAC | 414 |
| chr3 | 58141834 | 58141851 | +/− | 18 | TAATCTCCATTTGCCACT | 415 |
| chr3 | 58141835 | 58141852 | +/− | 18 | AATCTCCATTTGCCACTG | 416 |
| chr3 | 58141836 | 58141853 | +/− | 18 | ATCTCCATTTGCCACTGA | 417 |
| chr3 | 58141837 | 58141854 | +/− | 18 | TCTCCATTTGCCACTGAC | 418 |
| chr3 | 58141838 | 58141855 | +/− | 18 | CTCCATTTGCCACTGACC | 419 |
| chr3 | 58141839 | 58141856 | +/− | 18 | TCCATTTGCCACTGACCA | 420 |
| chr3 | 58141840 | 58141857 | +/− | 18 | CCATTTGCCACTGACCAG | 421 |
| chr3 | 58141841 | 58141858 | +/− | 18 | CATTTGCCACTGACCAGG | 422 |
| chr3 | 58141842 | 58141859 | +/− | 18 | ATTTGCCACTGACCAGGC | 423 |
| chr3 | 58141843 | 58141860 | +/− | 18 | TTTGCCACTGACCAGGCC | 424 |
| chr3 | 58141844 | 58141861 | +/− | 18 | TTGCCACTGACCAGGCCA | 425 |
| chr3 | 58141845 | 58141862 | +/− | 18 | TGCCACTGACCAGGCCAC | 426 |
| chr3 | 58141846 | 58141863 | +/− | 18 | GCCACTGACCAGGCCACA | 427 |
| chr3 | 58141847 | 58141864 | +/− | 18 | CCACTGACCAGGCCACAG | 428 |
| chr3 | 58141848 | 58141865 | +/− | 18 | CACTGACCAGGCCACAGA | 429 |
| chr3 | 58141849 | 58141866 | +/− | 18 | ACTGACCAGGCCACAGAT | 430 |
| chr3 | 58141850 | 58141867 | +/− | 18 | CTGACCAGGCCACAGATG | 431 |
| chr3 | 58141851 | 58141868 | +/− | 18 | TGACCAGGCCACAGATGG | 432 |
| chr3 | 58141852 | 58141869 | +/− | 18 | GACCAGGCCACAGATGGG | 433 |
| chr3 | 58141853 | 58141870 | +/− | 18 | ACCAGGCCACAGATGGGG | 434 |
| chr3 | 58141854 | 58141871 | +/− | 18 | CCAGGCCACAGATGGGGA | 435 |
| chr3 | 58141855 | 58141872 | +/− | 18 | CAGGCCACAGATGGGGAA | 436 |
| chr3 | 58141856 | 58141873 | +/− | 18 | AGGCCACAGATGGGGAAG | 437 |
| chr3 | 58141857 | 58141874 | +/− | 18 | GGCCACAGATGGGGAAGT | 438 |
| chr3 | 58141858 | 58141875 | +/− | 18 | GCCACAGATGGGGAAGTC | 439 |
| chr3 | 58141859 | 58141876 | +/− | 18 | CCACAGATGGGGAAGTCA | 440 |
| chr3 | 58141860 | 58141877 | +/− | 18 | CACAGATGGGGAAGTCAC | 441 |
| chr3 | 58141861 | 58141878 | +/− | 18 | ACAGATGGGGAAGTCACA | 442 |
| chr3 | 58141862 | 58141879 | +/− | 18 | CAGATGGGGAAGTCACAG | 443 |
| chr3 | 58141863 | 58141880 | +/− | 18 | AGATGGGGAAGTCACAGC | 444 |
| chr3 | 58141864 | 58141881 | +/− | 18 | GATGGGGAAGTCACAGCC | 445 |
| chr3 | 58141865 | 58141882 | +/− | 18 | ATGGGGAAGTCACAGCCG | 446 |
| chr3 | 58141866 | 58141883 | +/− | 18 | TGGGGAAGTCACAGCCGT | 447 |
| chr3 | 58141867 | 58141884 | +/− | 18 | GGGGAAGTCACAGCCGTG | 448 |
| chr3 | 58141868 | 58141885 | +/− | 18 | GGGAAGTCACAGCCGTGG | 449 |
| chr3 | 58141869 | 58141886 | +/− | 18 | GGAAGTCACAGCCGTGGA | 450 |
| chr3 | 58141870 | 58141887 | +/− | 18 | GAAGTCACAGCCGTGGAG | 451 |
| chr3 | 58141871 | 58141888 | +/− | 18 | AAGTCACAGCCGTGGAGG | 452 |
| chr3 | 58141872 | 58141889 | +/− | 18 | AGTCACAGCCGTGGAGGA | 453 |
| chr3 | 58141873 | 58141890 | +/− | 18 | GTCACAGCCGTGGAGGAG | 454 |
| chr3 | 58141874 | 58141891 | +/− | 18 | TCACAGCCGTGGAGGAGG | 455 |
| chr3 | 58141875 | 58141892 | +/− | 18 | CACAGCCGTGGAGGAGGC | 456 |
| chr3 | 58141876 | 58141893 | +/− | 18 | ACAGCCGTGGAGGAGGCA | 457 |
| chr3 | 58141877 | 58141894 | +/− | 18 | CAGCCGTGGAGGAGGCAC | 458 |
| chr3 | 58141878 | 58141895 | +/− | 18 | AGCCGTGGAGGAGGCACC | 459 |
| chr3 | 58141879 | 58141896 | +/− | 18 | GCCGTGGAGGAGGCACCG | 460 |
| chr3 | 58141880 | 58141897 | +/− | 18 | CCGTGGAGGAGGCACCGG | 461 |
| chr3 | 58141881 | 58141898 | +/− | 18 | CGTGGAGGAGGCACCGGT | 462 |
| chr3 | 58141882 | 58141899 | +/− | 18 | GTGGAGGAGGCACCGGTA | 463 |
| chr3 | 58141883 | 58141900 | +/− | 18 | TGGAGGAGGCACCGGTAA | 464 |
| chr3 | 58141884 | 58141901 | +/− | 18 | GGAGGAGGCACCGGTAAA | 465 |
| chr3 | 58141885 | 58141902 | +/− | 18 | GAGGAGGCACCGGTAAAT | 466 |
| chr3 | 58141886 | 58141903 | +/− | 18 | AGGAGGCACCGGTAAATG | 467 |
| chr3 | 58141887 | 58141904 | +/− | 18 | GGAGGCACCGGTAAATGC | 468 |
| chr3 | 58141888 | 58141905 | +/− | 18 | GAGGCACCGGTAAATGCA | 469 |
| chr3 | 58141889 | 58141906 | +/− | 18 | AGGCACCGGTAAATGCAT | 470 |
| chr3 | 58141890 | 58141907 | +/− | 18 | GGCACCGGTAAATGCATG | 471 |
| chr3 | 58141891 | 58141908 | +/− | 18 | GCACCGGTAAATGCATGT | 472 |
| chr3 | 58141892 | 58141909 | +/− | 18 | CACCGGTAAATGCATGTC | 473 |
| chr3 | 58141893 | 58141910 | +/− | 18 | ACCGGTAAATGCATGTCC | 474 |
| chr3 | 58141894 | 58141911 | +/− | 18 | CCGGTAAATGCATGTCCC | 475 |
| chr3 | 58141895 | 58141912 | +/− | 18 | CGGTAAATGCATGTCCCC | 476 |
| chr3 | 58141896 | 58141913 | +/− | 18 | GGTAAATGCATGTCCCCC | 477 |
| chr3 | 58141897 | 58141914 | +/− | 18 | GTAAATGCATGTCCCCCT | 478 |
| chr3 | 58141898 | 58141915 | +/− | 18 | TAAATGCATGTCCCCCTG | 479 |
| chr3 | 58141899 | 58141916 | +/− | 18 | AAATGCATGTCCCCCTGG | 480 |
| chr3 | 58141900 | 58141917 | +/− | 18 | AATGCATGTCCCCCTGGA | 481 |
| chr3 | 58141901 | 58141918 | +/− | 18 | ATGCATGTCCCCCTGGAT | 482 |
| chr3 | 58141902 | 58141919 | +/− | 18 | TGCATGTCCCCCTGGATT | 483 |
| chr3 | 58141903 | 58141920 | +/− | 18 | GCATGTCCCCCTGGATTC | 484 |
| chr3 | 58141904 | 58141921 | +/− | 18 | CATGTCCCCCTGGATTCA | 485 |
| chr3 | 58141905 | 58141922 | +/− | 18 | ATGTCCCCCTGGATTCAG | 486 |
| chr3 | 58141906 | 58141923 | +/− | 18 | TGTCCCCCTGGATTCAGG | 487 |
| chr3 | 58141907 | 58141924 | +/− | 18 | GTCCCCCTGGATTCAGGC | 488 |
| chr3 | 58141908 | 58141925 | +/− | 18 | TCCCCCTGGATTCAGGCC | 489 |
| chr3 | 58141909 | 58141926 | +/− | 18 | CCCCCTGGATTCAGGCCC | 490 |
| chr3 | 58141910 | 58141927 | +/− | 18 | CCCCTGGATTCAGGCCCT | 491 |
| chr3 | 58141911 | 58141928 | +/− | 18 | CCCTGGATTCAGGCCCTG | 492 |
| chr3 | 58141912 | 58141929 | +/− | 18 | CCTGGATTCAGGCCCTGG | 493 |
| chr3 | 58141913 | 58141930 | +/− | 18 | CTGGATTCAGGCCCTGGG | 494 |
| chr3 | 58141914 | 58141931 | +/− | 18 | TGGATTCAGGCCCTGGGT | 495 |
| chr3 | 58141915 | 58141932 | +/− | 18 | GGATTCAGGCCCTGGGTA | 496 |
| chr3 | 58141916 | 58141933 | +/− | 18 | GATTCAGGCCCTGGGTAC | 497 |
| chr3 | 58141917 | 58141934 | +/− | 18 | ATTCAGGCCCTGGGTACA | 498 |
| chr3 | 58141918 | 58141935 | +/− | 18 | TTCAGGCCCTGGGTACAA | 499 |
| chr3 | 58141919 | 58141936 | +/− | 18 | TCAGGCCCTGGGTACAAT | 500 |
| chr3 | 58141920 | 58141937 | +/− | 18 | CAGGCCCTGGGTACAATT | 501 |
| chr3 | 58141921 | 58141938 | +/− | 18 | AGGCCCTGGGTACAATTT | 502 |
| chr3 | 58141922 | 58141939 | +/− | 18 | GGCCCTGGGTACAATTTT | 503 |
| chr3 | 58141923 | 58141940 | +/− | 18 | GCCCTGGGTACAATTTTG | 504 |
| chr3 | 58141924 | 58141941 | +/− | 18 | CCCTGGGTACAATTTTGG | 505 |
| chr3 | 58141925 | 58141942 | +/− | 18 | CCTGGGTACAATTTTGGT | 506 |
| chr3 | 58141926 | 58141943 | +/− | 18 | CTGGGTACAATTTTGGTT | 507 |
| chr3 | 58141927 | 58141944 | +/− | 18 | TGGGTACAATTTTGGTTT | 508 |
| chr3 | 58141928 | 58141945 | +/− | 18 | GGGTACAATTTTGGTTTT | 509 |
| chr3 | 58141929 | 58141946 | +/− | 18 | GGTACAATTTTGGTTTTT | 510 |
| chr3 | 58141930 | 58141947 | +/− | 18 | GTACAATTTTGGTTTTTT | 511 |
| chr3 | 58141931 | 58141948 | +/− | 18 | TACAATTTTGGTTTTTTC | 512 |
| chr3 | 58141932 | 58141949 | +/− | 18 | ACAATTTTGGTTTTTTCC | 513 |
| chr3 | 58141933 | 58141950 | +/− | 18 | CAATTTTGGTTTTTTCCT | 514 |
| chr3 | 58141934 | 58141951 | +/− | 18 | AATTTTGGTTTTTTCCTT | 515 |
| chr3 | 58141935 | 58141952 | +/− | 18 | ATTTTGGTTTTTTCCTTT | 516 |
| chr3 | 58141936 | 58141953 | +/− | 18 | TTTTGGTTTTTTCCTTTT | 517 |
| chr3 | 58141937 | 58141954 | +/− | 18 | TTTGGTTTTTTCCTTTTT | 518 |
| chr3 | 58141938 | 58141955 | +/− | 18 | TTGGTTTTTTCCTTTTTG | 519 |
| chr3 | 58141939 | 58141956 | +/− | 18 | TGGTTTTTTCCTTTTTGT | 520 |
| chr3 | 58141940 | 58141957 | +/− | 18 | GGTTTTTTCCTTTTTGTG | 521 |
| chr3 | 58141941 | 58141958 | +/− | 18 | GTTTTTTCCTTTTTGTGT | 522 |
| chr3 | 58141942 | 58141959 | +/− | 18 | TTTTTTCCTTTTTGTGTT | 523 |
| chr3 | 58141943 | 58141960 | +/− | 18 | TTTTTCCTTTTTGTGTTT | 524 |
| chr3 | 58141944 | 58141961 | +/− | 18 | TTTTCCTTTTTGTGTTTC | 525 |
| chr3 | 58141945 | 58141962 | +/− | 18 | TTTCCTTTTTGTGTTTCT | 526 |
| chr3 | 58141946 | 58141963 | +/− | 18 | TTCCTTTTTGTGTTTCTG | 527 |
| chr3 | 58141947 | 58141964 | +/− | 18 | TCCTTTTTGTGTTTCTGT | 528 |
| chr3 | 58141948 | 58141965 | +/− | 18 | CCTTTTTGTGTTTCTGTG | 529 |
| chr3 | 58141949 | 58141966 | +/− | 18 | CTTTTTGTGTTTCTGTGT | 530 |
| chr3 | 58141950 | 58141967 | +/− | 18 | TTTTTGTGTTTCTGTGTT | 531 |
| chr3 | 58141951 | 58141968 | +/− | 18 | TTTTGTGTTTCTGTGTTT | 532 |
| chr3 | 58141952 | 58141969 | +/− | 18 | TTTGTGTTTCTGTGTTTA | 533 |
| chr3 | 58141953 | 58141970 | +/− | 18 | TTGTGTTTCTGTGTTTAC | 534 |
| chr3 | 58141954 | 58141971 | +/− | 18 | TGTGTTTCTGTGTTTACT | 535 |
| chr3 | 58141955 | 58141972 | +/− | 18 | GTGTTTCTGTGTTTACTC | 536 |
| chr3 | 58141956 | 58141973 | +/− | 18 | TGTTTCTGTGTTTACTCA | 537 |
| chr3 | 58141957 | 58141974 | +/− | 18 | GTTTCTGTGTTTACTCAG | 538 |
| chr3 | 58141958 | 58141975 | +/− | 18 | TTTCTGTGTTTACTCAGC | 539 |
| chr3 | 58141959 | 58141976 | +/− | 18 | TTCTGTGTTTACTCAGCC | 540 |
| chr3 | 58141960 | 58141977 | +/− | 18 | TCTGTGTTTACTCAGCCT | 541 |
| chr3 | 58141961 | 58141978 | +/− | 18 | CTGTGTTTACTCAGCCTT | 542 |
| chr3 | 58141962 | 58141979 | +/− | 18 | TGTGTTTACTCAGCCTTC | 543 |
| chr3 | 58141963 | 58141980 | +/− | 18 | GTGTTTACTCAGCCTTCA | 544 |
| chr3 | 58141964 | 58141981 | +/− | 18 | TGTTTACTCAGCCTTCAT | 545 |
| chr3 | 58141965 | 58141982 | +/− | 18 | GTTTACTCAGCCTTCATT | 546 |
| chr3 | 58141966 | 58141983 | +/− | 18 | TTTACTCAGCCTTCATTT | 547 |
| chr3 | 58141967 | 58141984 | +/− | 18 | TTACTCAGCCTTCATTTC | 548 |
| chr3 | 58141968 | 58141985 | +/− | 18 | TACTCAGCCTTCATTTCA | 549 |
| chr3 | 58141969 | 58141986 | +/− | 18 | ACTCAGCCTTCATTTCAG | 550 |
| chr3 | 58141970 | 58141987 | +/− | 18 | CTCAGCCTTCATTTCAGA | 551 |
| chr3 | 58141971 | 58141988 | +/− | 18 | TCAGCCTTCATTTCAGAA | 552 |
| chr3 | 58141972 | 58141989 | +/− | 18 | CAGCCTTCATTTCAGAAA | 553 |
| chr3 | 58141973 | 58141990 | +/− | 18 | AGCCTTCATTTCAGAAAA | 554 |
| chr3 | 58141974 | 58141991 | +/− | 18 | GCCTTCATTTCAGAAAAT | 555 |
| chr3 | 58141975 | 58141992 | +/− | 18 | CCTTCATTTCAGAAAATC | 556 |
| chr3 | 58141976 | 58141993 | +/− | 18 | CTTCATTTCAGAAAATCT | 557 |
| chr3 | 58141977 | 58141994 | +/− | 18 | TTCATTTCAGAAAATCTG | 558 |
| chr3 | 58141978 | 58141995 | +/− | 18 | TCATTTCAGAAAATCTGC | 559 |
| chr3 | 58141979 | 58141996 | +/− | 18 | CATTTCAGAAAATCTGCC | 560 |
| chr3 | 58141980 | 58141997 | +/− | 18 | ATTTCAGAAAATCTGCCA | 561 |
| chr3 | 58141981 | 58141998 | +/− | 18 | TTTCAGAAAATCTGCCAT | 562 |
| chr3 | 58141982 | 58141999 | +/− | 18 | TTCAGAAAATCTGCCATC | 563 |
| chr3 | 58141983 | 58142000 | +/− | 18 | TCAGAAAATCTGCCATCT | 564 |
| chr3 | 58141984 | 58142001 | +/− | 18 | CAGAAAATCTGCCATCTG | 565 |
| chr3 | 58141985 | 58142002 | +/− | 18 | AGAAAATCTGCCATCTGC | 566 |
| chr3 | 58141986 | 58142003 | +/− | 18 | GAAAATCTGCCATCTGCT | 567 |
| chr3 | 58141987 | 58142004 | +/− | 18 | AAAATCTGCCATCTGCTT | 568 |
| chr3 | 58141988 | 58142005 | +/− | 18 | AAATCTGCCATCTGCTTC | 569 |
| chr3 | 58141989 | 58142006 | +/− | 18 | AATCTGCCATCTGCTTCT | 570 |
| chr3 | 58141990 | 58142007 | +/− | 18 | ATCTGCCATCTGCTTCTG | 571 |
| chr3 | 58141991 | 58142008 | +/− | 18 | TCTGCCATCTGCTTCTGG | 572 |
| chr3 | 58141992 | 58142009 | +/− | 18 | CTGCCATCTGCTTCTGGG | 573 |
| chr3 | 58141993 | 58142010 | +/− | 18 | TGCCATCTGCTTCTGGGA | 574 |
| chr3 | 58141994 | 58142011 | +/− | 18 | GCCATCTGCTTCTGGGAT | 575 |
| chr3 | 58141995 | 58142012 | +/− | 18 | CCATCTGCTTCTGGGATT | 576 |
| chr3 | 58141996 | 58142013 | +/− | 18 | CATCTGCTTCTGGGATTG | 577 |
| chr3 | 58141997 | 58142014 | +/− | 18 | ATCTGCTTCTGGGATTGC | 578 |
| chr3 | 58141998 | 58142015 | +/− | 18 | TCTGCTTCTGGGATTGCT | 579 |
| chr3 | 58141999 | 58142016 | +/− | 18 | CTGCTTCTGGGATTGCTT | 580 |
| chr3 | 58142000 | 58142017 | +/− | 18 | TGCTTCTGGGATTGCTTA | 581 |
| chr3 | 58142001 | 58142018 | +/− | 18 | GCTTCTGGGATTGCTTAA | 582 |
| chr3 | 58142002 | 58142019 | +/− | 18 | CTTCTGGGATTGCTTAAG | 583 |
| chr3 | 58142003 | 58142020 | +/− | 18 | TTCTGGGATTGCTTAAGC | 584 |
| chr3 | 58142004 | 58142021 | +/− | 18 | TCTGGGATTGCTTAAGCC | 585 |
| chr3 | 58142005 | 58142022 | +/− | 18 | CTGGGATTGCTTAAGCCC | 586 |
| chr3 | 58142006 | 58142023 | +/− | 18 | TGGGATTGCTTAAGCCCT | 587 |
| chr3 | 58142007 | 58142024 | +/− | 18 | GGGATTGCTTAAGCCCTG | 588 |
| chr3 | 58142008 | 58142025 | +/− | 18 | GGATTGCTTAAGCCCTGT | 589 |
| chr3 | 58142009 | 58142026 | +/− | 18 | GATTGCTTAAGCCCTGTG | 590 |
| chr3 | 58142010 | 58142027 | +/− | 18 | ATTGCTTAAGCCCTGTGG | 591 |
| chr3 | 58142011 | 58142028 | +/− | 18 | TTGCTTAAGCCCTGTGGG | 592 |
| chr3 | 58142012 | 58142029 | +/− | 18 | TGCTTAAGCCCTGTGGGT | 593 |
| chr3 | 58142013 | 58142030 | +/− | 18 | GCTTAAGCCCTGTGGGTG | 594 |
| chr3 | 58142014 | 58142031 | +/− | 18 | CTTAAGCCCTGTGGGTGT | 595 |
| chr3 | 58142015 | 58142032 | +/− | 18 | TTAAGCCCTGTGGGTGTC | 596 |
| chr3 | 58142016 | 58142033 | +/− | 18 | TAAGCCCTGTGGGTGTCC | 597 |
| chr3 | 58142017 | 58142034 | +/− | 18 | AAGCCCTGTGGGTGTCCT | 598 |
| chr3 | 58142018 | 58142035 | +/− | 18 | AGCCCTGTGGGTGTCCTG | 599 |
| chr3 | 58142019 | 58142036 | +/− | 18 | GCCCTGTGGGTGTCCTGG | 600 |
| chr3 | 58142020 | 58142037 | +/− | 18 | CCCTGTGGGTGTCCTGGT | 601 |
| chr3 | 58142021 | 58142038 | +/− | 18 | CCTGTGGGTGTCCTGGTC | 602 |
| chr3 | 58142022 | 58142039 | +/− | 18 | CTGTGGGTGTCCTGGTCA | 603 |
| chr3 | 58142023 | 58142040 | +/− | 18 | TGTGGGTGTCCTGGTCAT | 604 |
| chr3 | 58142024 | 58142041 | +/− | 18 | GTGGGTGTCCTGGTCATT | 605 |
| chr3 | 58142025 | 58142042 | +/− | 18 | TGGGTGTCCTGGTCATTG | 606 |
| chr3 | 58142026 | 58142043 | +/− | 18 | GGGTGTCCTGGTCATTGG | 607 |
| chr3 | 58142027 | 58142044 | +/− | 18 | GGTGTCCTGGTCATTGGT | 608 |

TABLE 5
19-mer target-specific ASOs

| | | | | | | SEQ |
|---|---|---|---|---|---|---|
| | | | | | | ID |
| CHR | START | END | STRAND | kmer | SEQUENCE | NO: |
| chr3 | 58141828 | 58141846 | +/− | 19 | CCCAACTAATCTCCATTTG | 609 |
| chr3 | 58141829 | 58141847 | +/− | 19 | CCAACTAATCTCCATTTGC | 610 |
| chr3 | 58141830 | 58141848 | +/− | 19 | CAACTAATCTCCATTTGCC | 611 |
| chr3 | 58141831 | 58141849 | +/− | 19 | AACTAATCTCCATTTGCCA | 612 |
| chr3 | 58141832 | 58141850 | +/− | 19 | ACTAATCTCCATTTGCCAC | 613 |
| chr3 | 58141833 | 58141851 | +/− | 19 | CTAATCTCCATTTGCCACT | 614 |
| chr3 | 58141834 | 58141852 | +/− | 19 | TAATCTCCATTTGCCACTG | 615 |
| chr3 | 58141835 | 58141853 | +/− | 19 | AATCTCCATTTGCCACTGA | 616 |
| chr3 | 58141836 | 58141854 | +/− | 19 | ATCTCCATTTGCCACTGAC | 617 |
| chr3 | 58141837 | 58141855 | +/− | 19 | TCTCCATTTGCCACTGACC | 618 |
| chr3 | 58141838 | 58141856 | +/− | 19 | CTCCATTTGCCACTGACCA | 619 |
| chr3 | 58141839 | 58141857 | +/− | 19 | TCCATTTGCCACTGACCAG | 620 |
| chr3 | 58141840 | 58141858 | +/− | 19 | CCATTTGCCACTGACCAGG | 621 |
| chr3 | 58141841 | 58141859 | +/− | 19 | CATTTGCCACTGACCAGGC | 622 |
| chr3 | 58141842 | 58141860 | +/− | 19 | ATTTGCCACTGACCAGGCC | 623 |
| chr3 | 58141843 | 58141861 | +/− | 19 | TTTGCCACTGACCAGGCCA | 624 |
| chr3 | 58141844 | 58141862 | +/− | 19 | TTGCCACTGACCAGGCCAC | 625 |
| chr3 | 58141845 | 58141863 | +/− | 19 | TGCCACTGACCAGGCCACA | 626 |
| chr3 | 58141846 | 58141864 | +/− | 19 | GCCACTGACCAGGCCACAG | 627 |
| chr3 | 58141847 | 58141865 | +/− | 19 | CCACTGACCAGGCCACAGA | 628 |
| chr3 | 58141848 | 58141866 | +/− | 19 | CACTGACCAGGCCACAGAT | 629 |
| chr3 | 58141849 | 58141867 | +/− | 19 | ACTGACCAGGCCACAGATG | 630 |
| chr3 | 58141850 | 58141868 | +/− | 19 | CTGACCAGGCCACAGATGG | 631 |
| chr3 | 58141851 | 58141869 | +/− | 19 | TGACCAGGCCACAGATGGG | 632 |
| chr3 | 58141852 | 58141870 | +/− | 19 | GACCAGGCCACAGATGGGG | 633 |
| chr3 | 58141853 | 58141871 | +/− | 19 | ACCAGGCCACAGATGGGGA | 634 |
| chr3 | 58141854 | 58141872 | +/− | 19 | CCAGGCCACAGATGGGGAA | 635 |
| chr3 | 58141855 | 58141873 | +/− | 19 | CAGGCCACAGATGGGGAAG | 636 |
| chr3 | 58141856 | 58141874 | +/− | 19 | AGGCCACAGATGGGGAAGT | 637 |
| chr3 | 58141857 | 58141875 | +/− | 19 | GGCCACAGATGGGGAAGTC | 638 |
| chr3 | 58141858 | 58141876 | +/− | 19 | GCCACAGATGGGGAAGTCA | 639 |
| chr3 | 58141859 | 58141877 | +/− | 19 | CCACAGATGGGGAAGTCAC | 640 |
| chr3 | 58141860 | 58141878 | +/− | 19 | CACAGATGGGGAAGTCACA | 641 |
| chr3 | 58141861 | 58141879 | +/− | 19 | ACAGATGGGGAAGTCACAG | 642 |
| chr3 | 58141862 | 58141880 | +/− | 19 | CAGATGGGGAAGTCACAGC | 643 |
| chr3 | 58141863 | 58141881 | +/− | 19 | AGATGGGGAAGTCACAGCC | 644 |
| chr3 | 58141864 | 58141882 | +/− | 19 | GATGGGGAAGTCACAGCCG | 645 |
| chr3 | 58141865 | 58141883 | +/− | 19 | ATGGGGAAGTCACAGCCGT | 646 |
| chr3 | 58141866 | 58141884 | +/− | 19 | TGGGGAAGTCACAGCCGTG | 647 |
| chr3 | 58141867 | 58141885 | +/− | 19 | GGGGAAGTCACAGCCGTGG | 648 |
| chr3 | 58141868 | 58141886 | +/− | 19 | GGGAAGTCACAGCCGTGGA | 649 |
| chr3 | 58141869 | 58141887 | +/− | 19 | GGAAGTCACAGCCGTGGAG | 650 |
| chr3 | 58141870 | 58141888 | +/− | 19 | GAAGTCACAGCCGTGGAGG | 651 |
| chr3 | 58141871 | 58141889 | +/− | 19 | AAGTCACAGCCGTGGAGGA | 652 |
| chr3 | 58141872 | 58141890 | +/− | 19 | AGTCACAGCCGTGGAGGAG | 653 |
| chr3 | 58141873 | 58141891 | +/− | 19 | GTCACAGCCGTGGAGGAGG | 654 |
| chr3 | 58141874 | 58141892 | +/− | 19 | TCACAGCCGTGGAGGAGGC | 655 |
| chr3 | 58141875 | 58141893 | +/− | 19 | CACAGCCGTGGAGGAGGCA | 656 |
| chr3 | 58141876 | 58141894 | +/− | 19 | ACAGCCGTGGAGGAGGCAC | 657 |
| chr3 | 58141877 | 58141895 | +/− | 19 | CAGCCGTGGAGGAGGCACC | 658 |
| chr3 | 58141878 | 58141896 | +/− | 19 | AGCCGTGGAGGAGGCACCG | 659 |
| chr3 | 58141879 | 58141897 | +/− | 19 | GCCGTGGAGGAGGCACCGG | 660 |
| chr3 | 58141880 | 58141898 | +/− | 19 | CCGTGGAGGAGGCACCGGT | 661 |
| chr3 | 58141881 | 58141899 | +/− | 19 | CGTGGAGGAGGCACCGGTA | 662 |
| chr3 | 58141882 | 58141900 | +/− | 19 | GTGGAGGAGGCACCGGTAA | 663 |
| chr3 | 58141883 | 58141901 | +/− | 19 | TGGAGGAGGCACCGGTAAA | 664 |
| chr3 | 58141884 | 58141902 | +/− | 19 | GGAGGAGGCACCGGTAAAT | 665 |
| chr3 | 58141885 | 58141903 | +/− | 19 | GAGGAGGCACCGGTAAATG | 666 |
| chr3 | 58141886 | 58141904 | +/− | 19 | AGGAGGCACCGGTAAATGC | 667 |
| chr3 | 58141887 | 58141905 | +/− | 19 | GGAGGCACCGGTAAATGCA | 668 |
| chr3 | 58141888 | 58141906 | +/− | 19 | GAGGCACCGGTAAATGCAT | 669 |
| chr3 | 58141889 | 58141907 | +/− | 19 | AGGCACCGGTAAATGCATG | 670 |
| chr3 | 58141890 | 58141908 | +/− | 19 | GGCACCGGTAAATGCATGT | 671 |
| chr3 | 58141891 | 58141909 | +/− | 19 | GCACCGGTAAATGCATGTC | 672 |
| chr3 | 58141892 | 58141910 | +/− | 19 | CACCGGTAAATGCATGTCC | 673 |
| chr3 | 58141893 | 58141911 | +/− | 19 | ACCGGTAAATGCATGTCCC | 674 |
| chr3 | 58141894 | 58141912 | +/− | 19 | CCGGTAAATGCATGTCCCC | 675 |
| chr3 | 58141895 | 58141913 | +/− | 19 | CGGTAAATGCATGTCCCCC | 676 |
| chr3 | 58141896 | 58141914 | +/− | 19 | GGTAAATGCATGTCCCCCT | 677 |
| chr3 | 58141897 | 58141915 | +/− | 19 | GTAAATGCATGTCCCCCTG | 678 |
| chr3 | 58141898 | 58141916 | +/− | 19 | TAAATGCATGTCCCCCTGG | 679 |
| chr3 | 58141899 | 58141917 | +/− | 19 | AAATGCATGTCCCCCTGGA | 680 |
| chr3 | 58141900 | 58141918 | +/− | 19 | AATGCATGTCCCCCTGGAT | 681 |
| chr3 | 58141901 | 58141919 | +/− | 19 | ATGCATGTCCCCCTGGATT | 682 |
| chr3 | 58141902 | 58141920 | +/− | 19 | TGCATGTCCCCCTGGATTC | 683 |
| chr3 | 58141903 | 58141921 | +/− | 19 | GCATGTCCCCCTGGATTCA | 684 |
| chr3 | 58141904 | 58141922 | +/− | 19 | CATGTCCCCCTGGATTCAG | 685 |
| chr3 | 58141905 | 58141923 | +/− | 19 | ATGTCCCCCTGGATTCAGG | 686 |
| chr3 | 58141906 | 58141924 | +/− | 19 | TGTCCCCCTGGATTCAGGC | 687 |
| chr3 | 58141907 | 58141925 | +/− | 19 | GTCCCCCTGGATTCAGGCC | 688 |
| chr3 | 58141908 | 58141926 | +/− | 19 | TCCCCCTGGATTCAGGCCC | 689 |
| chr3 | 58141909 | 58141927 | +/− | 19 | CCCCCTGGATTCAGGCCCT | 690 |
| chr3 | 58141910 | 58141928 | +/− | 19 | CCCCTGGATTCAGGCCCTG | 691 |
| chr3 | 58141911 | 58141929 | +/− | 19 | CCCTGGATTCAGGCCCTGG | 692 |
| chr3 | 58141912 | 58141930 | +/− | 19 | CCTGGATTCAGGCCCTGGG | 693 |
| chr3 | 58141913 | 58141931 | +/− | 19 | CTGGATTCAGGCCCTGGGT | 694 |
| chr3 | 58141914 | 58141932 | +/− | 19 | TGGATTCAGGCCCTGGGTA | 695 |
| chr3 | 58141915 | 58141933 | +/− | 19 | GGATTCAGGCCCTGGGTAC | 696 |
| chr3 | 58141916 | 58141934 | +/− | 19 | GATTCAGGCCCTGGGTACA | 697 |
| chr3 | 58141917 | 58141935 | +/− | 19 | ATTCAGGCCCTGGGTACAA | 698 |
| chr3 | 58141918 | 58141936 | +/− | 19 | TTCAGGCCCTGGGTACAAT | 699 |
| chr3 | 58141919 | 58141937 | +/− | 19 | TCAGGCCCTGGGTACAATT | 700 |
| chr3 | 58141920 | 58141938 | +/− | 19 | CAGGCCCTGGGTACAATTT | 701 |
| chr3 | 58141921 | 58141939 | +/− | 19 | AGGCCCTGGGTACAATTTT | 702 |
| chr3 | 58141922 | 58141940 | +/− | 19 | GGCCCTGGGTACAATTTTG | 703 |
| chr3 | 58141923 | 58141941 | +/− | 19 | GCCCTGGGTACAATTTTGG | 704 |
| chr3 | 58141924 | 58141942 | +/− | 19 | CCCTGGGTACAATTTTGGT | 705 |
| chr3 | 58141925 | 58141943 | +/− | 19 | CCTGGGTACAATTTTGGTT | 706 |
| chr3 | 58141926 | 58141944 | +/− | 19 | CTGGGTACAATTTTGGTTT | 707 |
| chr3 | 58141927 | 58141945 | +/− | 19 | TGGGTACAATTTTGGTTTT | 708 |
| chr3 | 58141928 | 58141946 | +/− | 19 | GGGTACAATTTTGGTTTTT | 709 |
| chr3 | 58141929 | 58141947 | +/− | 19 | GGTACAATTTTGGTTTTTT | 710 |
| chr3 | 58141930 | 58141948 | +/− | 19 | GTACAATTTTGGTTTTTTC | 711 |
| chr3 | 58141931 | 58141949 | +/− | 19 | TACAATTTTGGTTTTTTCC | 712 |
| chr3 | 58141932 | 58141950 | +/− | 19 | ACAATTTTGGTTTTTTCCT | 713 |
| chr3 | 58141933 | 58141951 | +/− | 19 | CAATTTTGGTTTTTTCCTT | 714 |
| chr3 | 58141934 | 58141952 | +/− | 19 | AATTTTGGTTTTTTCCTTT | 715 |
| chr3 | 58141935 | 58141953 | +/− | 19 | ATTTTGGTTTTTTCCTTTT | 716 |
| chr3 | 58141936 | 58141954 | +/− | 19 | TTTTGGTTTTTTCCTTTTT | 717 |
| chr3 | 58141937 | 58141955 | +/− | 19 | TTTGGTTTTTTCCTTTTTG | 718 |
| chr3 | 58141938 | 58141956 | +/− | 19 | TTGGTTTTTTCCTTTTTGT | 719 |
| chr3 | 58141939 | 58141957 | +/− | 19 | TGGTTTTTTCCTTTTTGTG | 720 |
| chr3 | 58141940 | 58141958 | +/− | 19 | GGTTTTTTCCTTTTTGTGT | 721 |
| chr3 | 58141941 | 58141959 | +/− | 19 | GTTTTTTCCTTTTTGTGTT | 722 |
| chr3 | 58141942 | 58141960 | +/− | 19 | TTTTTTCCTTTTTGTGTTT | 723 |
| chr3 | 58141943 | 58141961 | +/− | 19 | TTTTTCCTTTTTGTGTTTC | 724 |
| chr3 | 58141944 | 58141962 | +/− | 19 | TTTTCCTTTTTGTGTTTCT | 725 |
| chr3 | 58141945 | 58141963 | +/− | 19 | TTTCCTTTTTGTGTTTCTG | 726 |
| chr3 | 58141946 | 58141964 | +/− | 19 | TTCCTTTTTGTGTTTCTGT | 727 |
| chr3 | 58141947 | 58141965 | +/− | 19 | TCCTTTTTGTGTTTCTGTG | 728 |
| chr3 | 58141948 | 58141966 | +/− | 19 | CCTTTTTGTGTTTCTGTGT | 729 |
| chr3 | 58141949 | 58141967 | +/− | 19 | CTTTTTGTGTTTCTGTGTT | 730 |
| chr3 | 58141950 | 58141968 | +/− | 19 | TTTTTGTGTTTCTGTGTTT | 731 |
| chr3 | 58141951 | 58141969 | +/− | 19 | TTTTGTGTTTCTGTGTTTA | 732 |
| chr3 | 58141952 | 58141970 | +/− | 19 | TTTGTGTTTCTGTGTTTAC | 733 |
| chr3 | 58141953 | 58141971 | +/− | 19 | TTGTGTTTCTGTGTTTACT | 734 |
| chr3 | 58141954 | 58141972 | +/− | 19 | TGTGTTTCTGTGTTTACTC | 735 |
| chr3 | 58141955 | 58141973 | +/− | 19 | GTGTTTCTGTGTTTACTCA | 736 |
| chr3 | 58141956 | 58141974 | +/− | 19 | TGTTTCTGTGTTTACTCAG | 737 |
| chr3 | 58141957 | 58141975 | +/− | 19 | GTTTCTGTGTTTACTCAGC | 738 |
| chr3 | 58141958 | 58141976 | +/− | 19 | TTTCTGTGTTTACTCAGCC | 739 |
| chr3 | 58141959 | 58141977 | +/− | 19 | TTCTGTGTTTACTCAGCCT | 740 |
| chr3 | 58141960 | 58141978 | +/− | 19 | TCTGTGTTTACTCAGCCTT | 741 |
| chr3 | 58141961 | 58141979 | +/− | 19 | CTGTGTTTACTCAGCCTTC | 742 |
| chr3 | 58141962 | 58141980 | +/− | 19 | TGTGTTTACTCAGCCTTCA | 743 |
| chr3 | 58141963 | 58141981 | +/− | 19 | GTGTTTACTCAGCCTTCAT | 744 |
| chr3 | 58141964 | 58141982 | +/− | 19 | TGTTTACTCAGCCTTCATT | 745 |
| chr3 | 58141965 | 58141983 | +/− | 19 | GTTTACTCAGCCTTCATTT | 746 |
| chr3 | 58141966 | 58141984 | +/− | 19 | TTTACTCAGCCTTCATTTC | 747 |
| chr3 | 58141967 | 58141985 | +/− | 19 | TTACTCAGCCTTCATTTCA | 748 |
| chr3 | 58141968 | 58141986 | +/− | 19 | TACTCAGCCTTCATTTCAG | 749 |
| chr3 | 58141969 | 58141987 | +/− | 19 | ACTCAGCCTTCATTTCAGA | 750 |
| chr3 | 58141970 | 58141988 | +/− | 19 | CTCAGCCTTCATTTCAGAA | 751 |
| chr3 | 58141971 | 58141989 | +/− | 19 | TCAGCCTTCATTTCAGAAA | 752 |
| chr3 | 58141972 | 58141990 | +/− | 19 | CAGCCTTCATTTCAGAAAA | 753 |
| chr3 | 58141973 | 58141991 | +/− | 19 | AGCCTTCATTTCAGAAAAT | 754 |
| chr3 | 58141974 | 58141992 | +/− | 19 | GCCTTCATTTCAGAAAATC | 755 |
| chr3 | 58141975 | 58141993 | +/− | 19 | CCTTCATTTCAGAAAATCT | 756 |
| chr3 | 58141976 | 58141994 | +/− | 19 | CTTCATTTCAGAAAATCTG | 757 |
| chr3 | 58141977 | 58141995 | +/− | 19 | TTCATTTCAGAAAATCTGC | 758 |
| chr3 | 58141978 | 58141996 | +/− | 19 | TCATTTCAGAAAATCTGCC | 759 |
| chr3 | 58141979 | 58141997 | +/− | 19 | CATTTCAGAAAATCTGCCA | 760 |
| chr3 | 58141980 | 58141998 | +/− | 19 | ATTTCAGAAAATCTGCCAT | 761 |
| chr3 | 58141981 | 58141999 | +/− | 19 | TTTCAGAAAATCTGCCATC | 762 |
| chr3 | 58141982 | 58142000 | +/− | 19 | TTCAGAAAATCTGCCATCT | 763 |
| chr3 | 58141983 | 58142001 | +/− | 19 | TCAGAAAATCTGCCATCTG | 764 |
| chr3 | 58141984 | 58142002 | +/− | 19 | CAGAAAATCTGCCATCTGC | 765 |
| chr3 | 58141985 | 58142003 | +/− | 19 | AGAAAATCTGCCATCTGCT | 766 |
| chr3 | 58141986 | 58142004 | +/− | 19 | GAAAATCTGCCATCTGCTT | 767 |
| chr3 | 58141987 | 58142005 | +/− | 19 | AAAATCTGCCATCTGCTTC | 768 |
| chr3 | 58141988 | 58142006 | +/− | 19 | AAATCTGCCATCTGCTTCT | 769 |
| chr3 | 58141989 | 58142007 | +/− | 19 | AATCTGCCATCTGCTTCTG | 770 |
| chr3 | 58141990 | 58142008 | +/− | 19 | ATCTGCCATCTGCTTCTGG | 771 |
| chr3 | 58141991 | 58142009 | +/− | 19 | TCTGCCATCTGCTTCTGGG | 772 |
| chr3 | 58141992 | 58142010 | +/− | 19 | CTGCCATCTGCTTCTGGGA | 773 |
| chr3 | 58141993 | 58142011 | +/− | 19 | TGCCATCTGCTTCTGGGAT | 774 |
| chr3 | 58141994 | 58142012 | +/− | 19 | GCCATCTGCTTCTGGGATT | 775 |
| chr3 | 58141995 | 58142013 | +/− | 19 | CCATCTGCTTCTGGGATTG | 776 |
| chr3 | 58141996 | 58142014 | +/− | 19 | CATCTGCTTCTGGGATTGC | 777 |
| chr3 | 58141997 | 58142015 | +/− | 19 | ATCTGCTTCTGGGATTGCT | 778 |
| chr3 | 58141998 | 58142016 | +/− | 19 | TCTGCTTCTGGGATTGCTT | 779 |
| chr3 | 58141999 | 58142017 | +/− | 19 | CTGCTTCTGGGATTGCTTA | 780 |
| chr3 | 58142000 | 58142018 | +/− | 19 | TGCTTCTGGGATTGCTTAA | 781 |
| chr3 | 58142001 | 58142019 | +/− | 19 | GCTTCTGGGATTGCTTAAG | 782 |
| chr3 | 58142002 | 58142020 | +/− | 19 | CTTCTGGGATTGCTTAAGC | 783 |
| chr3 | 58142003 | 58142021 | +/− | 19 | TTCTGGGATTGCTTAAGCC | 784 |
| chr3 | 58142004 | 58142022 | +/− | 19 | TCTGGGATTGCTTAAGCCC | 785 |
| chr3 | 58142005 | 58142023 | +/− | 19 | CTGGGATTGCTTAAGCCCT | 786 |
| chr3 | 58142006 | 58142024 | +/− | 19 | TGGGATTGCTTAAGCCCTG | 787 |
| chr3 | 58142007 | 58142025 | +/− | 19 | GGGATTGCTTAAGCCCTGT | 788 |
| chr3 | 58142008 | 58142026 | +/− | 19 | GGATTGCTTAAGCCCTGTG | 789 |
| chr3 | 58142009 | 58142027 | +/− | 19 | GATTGCTTAAGCCCTGTGG | 790 |
| chr3 | 58142010 | 58142028 | +/− | 19 | ATTGCTTAAGCCCTGTGGG | 791 |
| chr3 | 58142011 | 58142029 | +/− | 19 | TTGCTTAAGCCCTGTGGGT | 792 |
| chr3 | 58142012 | 58142030 | +/− | 19 | TGCTTAAGCCCTGTGGGTG | 793 |
| chr3 | 58142013 | 58142031 | +/− | 19 | GCTTAAGCCCTGTGGGTGT | 794 |
| chr3 | 58142014 | 58142032 | +/− | 19 | CTTAAGCCCTGTGGGTGTC | 795 |
| chr3 | 58142015 | 58142033 | +/− | 19 | TTAAGCCCTGTGGGTGTCC | 796 |
| chr3 | 58142016 | 58142034 | +/− | 19 | TAAGCCCTGTGGGTGTCCT | 797 |
| chr3 | 58142017 | 58142035 | +/− | 19 | AAGCCCTGTGGGTGTCCTG | 798 |
| chr3 | 58142018 | 58142036 | +/− | 19 | AGCCCTGTGGGTGTCCTGG | 799 |
| chr3 | 58142019 | 58142037 | +/− | 19 | GCCCTGTGGGTGTCCTGGT | 800 |
| chr3 | 58142020 | 58142038 | +/− | 19 | CCCTGTGGGTGTCCTGGTC | 801 |
| chr3 | 58142021 | 58142039 | +/− | 19 | CCTGTGGGTGTCCTGGTCA | 802 |
| chr3 | 58142022 | 58142040 | +/− | 19 | CTGTGGGTGTCCTGGTCAT | 803 |
| chr3 | 58142023 | 58142041 | +/− | 19 | TGTGGGTGTCCTGGTCATT | 804 |
| chr3 | 58142024 | 58142042 | +/− | 19 | GTGGGTGTCCTGGTCATTG | 805 |
| chr3 | 58142025 | 58142043 | +/− | 19 | TGGGTGTCCTGGTCATTGG | 806 |
| chr3 | 58142026 | 58142044 | +/− | 19 | GGGTGTCCTGGTCATTGGT | 807 |

TABLE 6
20-mer target-specific ASOs

| | | | | | | SEQ |
|---|---|---|---|---|---|---|
| | | | | | | ID |
| CHR | START | END | STRAND | kmer | SEQUENCE | NO: |
| chr3 | 58141828 | 58141847 | +/− | 20 | CCCAACTAATCTCCATTTGC | 808 |
| chr3 | 58141829 | 58141848 | +/− | 20 | CCAACTAATCTCCATTTGCC | 809 |
| chr3 | 58141830 | 58141849 | +/− | 20 | CAACTAATCTCCATTTGCCA | 810 |
| chr3 | 58141831 | 58141850 | +/− | 20 | AACTAATCTCCATTTGCCAC | 811 |
| chr3 | 58141832 | 58141851 | +/− | 20 | ACTAATCTCCATTTGCCACT | 812 |
| chr3 | 58141833 | 58141852 | +/− | 20 | CTAATCTCCATTTGCCACTG | 813 |
| chr3 | 58141834 | 58141853 | +/− | 20 | TAATCTCCATTTGCCACTGA | 814 |
| chr3 | 58141835 | 58141854 | +/− | 20 | AATCTCCATTTGCCACTGAC | 815 |
| chr3 | 58141836 | 58141855 | +/− | 20 | ATCTCCATTTGCCACTGACC | 816 |
| chr3 | 58141837 | 58141856 | +/− | 20 | TCTCCATTTGCCACTGACCA | 817 |
| chr3 | 58141838 | 58141857 | +/− | 20 | CTCCATTTGCCACTGACCAG | 818 |
| chr3 | 58141839 | 58141858 | +/− | 20 | TCCATTTGCCACTGACCAGG | 819 |
| chr3 | 58141840 | 58141859 | +/− | 20 | CCATTTGCCACTGACCAGGC | 820 |
| chr3 | 58141841 | 58141860 | +/− | 20 | CATTTGCCACTGACCAGGCC | 821 |
| chr3 | 58141842 | 58141861 | +/− | 20 | ATTTGCCACTGACCAGGCCA | 822 |
| chr3 | 58141843 | 58141862 | +/− | 20 | TTTGCCACTGACCAGGCCAC | 823 |
| chr3 | 58141844 | 58141863 | +/− | 20 | TTGCCACTGACCAGGCCACA | 824 |
| chr3 | 58141845 | 58141864 | +/− | 20 | TGCCACTGACCAGGCCACAG | 825 |
| chr3 | 58141846 | 58141865 | +/− | 20 | GCCACTGACCAGGCCACAGA | 826 |
| chr3 | 58141847 | 58141866 | +/− | 20 | CCACTGACCAGGCCACAGAT | 827 |
| chr3 | 58141848 | 58141867 | +/− | 20 | CACTGACCAGGCCACAGATG | 828 |
| chr3 | 58141849 | 58141868 | +/− | 20 | ACTGACCAGGCCACAGATGG | 829 |
| chr3 | 58141850 | 58141869 | +/− | 20 | CTGACCAGGCCACAGATGGG | 830 |
| chr3 | 58141851 | 58141870 | +/− | 20 | TGACCAGGCCACAGATGGGG | 831 |
| chr3 | 58141852 | 58141871 | +/− | 20 | GACCAGGCCACAGATGGGGA | 832 |
| chr3 | 58141853 | 58141872 | +/− | 20 | ACCAGGCCACAGATGGGGAA | 833 |
| chr3 | 58141854 | 58141873 | +/− | 20 | CCAGGCCACAGATGGGGAAG | 834 |
| chr3 | 58141855 | 58141874 | +/− | 20 | CAGGCCACAGATGGGGAAGT | 835 |
| chr3 | 58141856 | 58141875 | +/− | 20 | AGGCCACAGATGGGGAAGTC | 836 |
| chr3 | 58141857 | 58141876 | +/− | 20 | GGCCACAGATGGGGAAGTCA | 837 |
| chr3 | 58141858 | 58141877 | +/− | 20 | GCCACAGATGGGGAAGTCAC | 838 |
| chr3 | 58141859 | 58141878 | +/− | 20 | CCACAGATGGGGAAGTCACA | 839 |
| chr3 | 58141860 | 58141879 | +/− | 20 | CACAGATGGGGAAGTCACAG | 840 |
| chr3 | 58141861 | 58141880 | +/− | 20 | ACAGATGGGGAAGTCACAGC | 841 |
| chr3 | 58141862 | 58141881 | +/− | 20 | CAGATGGGGAAGTCACAGCC | 842 |
| chr3 | 58141863 | 58141882 | +/− | 20 | AGATGGGGAAGTCACAGCCG | 843 |
| chr3 | 58141864 | 58141883 | +/− | 20 | GATGGGGAAGTCACAGCCGT | 844 |
| chr3 | 58141865 | 58141884 | +/− | 20 | ATGGGGAAGTCACAGCCGTG | 845 |
| chr3 | 58141866 | 58141885 | +/− | 20 | TGGGGAAGTCACAGCCGTGG | 846 |
| chr3 | 58141867 | 58141886 | +/− | 20 | GGGGAAGTCACAGCCGTGGA | 847 |
| chr3 | 58141868 | 58141887 | +/− | 20 | GGGAAGTCACAGCCGTGGAG | 848 |
| chr3 | 58141869 | 58141888 | +/− | 20 | GGAAGTCACAGCCGTGGAGG | 849 |
| chr3 | 58141870 | 58141889 | +/− | 20 | GAAGTCACAGCCGTGGAGGA | 850 |
| chr3 | 58141871 | 58141890 | +/− | 20 | AAGTCACAGCCGTGGAGGAG | 851 |
| chr3 | 58141872 | 58141891 | +/− | 20 | AGTCACAGCCGTGGAGGAGG | 852 |
| chr3 | 58141873 | 58141892 | +/− | 20 | GTCACAGCCGTGGAGGAGGC | 853 |
| chr3 | 58141874 | 58141893 | +/− | 20 | TCACAGCCGTGGAGGAGGCA | 854 |
| chr3 | 58141875 | 58141894 | +/− | 20 | CACAGCCGTGGAGGAGGCAC | 855 |
| chr3 | 58141876 | 58141895 | +/− | 20 | ACAGCCGTGGAGGAGGCACC | 856 |
| chr3 | 58141877 | 58141896 | +/− | 20 | CAGCCGTGGAGGAGGCACCG | 857 |
| chr3 | 58141878 | 58141897 | +/− | 20 | AGCCGTGGAGGAGGCACCGG | 858 |
| chr3 | 58141879 | 58141898 | +/− | 20 | GCCGTGGAGGAGGCACCGGT | 859 |
| chr3 | 58141880 | 58141899 | +/− | 20 | CCGTGGAGGAGGCACCGGTA | 860 |
| chr3 | 58141881 | 58141900 | +/− | 20 | CGTGGAGGAGGCACCGGTAA | 861 |
| chr3 | 58141882 | 58141901 | +/− | 20 | GTGGAGGAGGCACCGGTAAA | 862 |
| chr3 | 58141883 | 58141902 | +/− | 20 | TGGAGGAGGCACCGGTAAAT | 863 |
| chr3 | 58141884 | 58141903 | +/− | 20 | GGAGGAGGCACCGGTAAATG | 864 |
| chr3 | 58141885 | 58141904 | +/− | 20 | GAGGAGGCACCGGTAAATGC | 865 |
| chr3 | 58141886 | 58141905 | +/− | 20 | AGGAGGCACCGGTAAATGCA | 866 |
| chr3 | 58141887 | 58141906 | +/− | 20 | GGAGGCACCGGTAAATGCAT | 867 |
| chr3 | 58141888 | 58141907 | +/− | 20 | GAGGCACCGGTAAATGCATG | 868 |
| chr3 | 58141889 | 58141908 | +/− | 20 | AGGCACCGGTAAATGCATGT | 869 |
| chr3 | 58141890 | 58141909 | +/− | 20 | GGCACCGGTAAATGCATGTC | 870 |
| chr3 | 58141891 | 58141910 | +/− | 20 | GCACCGGTAAATGCATGTCC | 871 |
| chr3 | 58141892 | 58141911 | +/− | 20 | CACCGGTAAATGCATGTCCC | 872 |
| chr3 | 58141893 | 58141912 | +/− | 20 | ACCGGTAAATGCATGTCCCC | 873 |
| chr3 | 58141894 | 58141913 | +/− | 20 | CCGGTAAATGCATGTCCCCC | 874 |
| chr3 | 58141895 | 58141914 | +/− | 20 | CGGTAAATGCATGTCCCCCT | 875 |
| chr3 | 58141896 | 58141915 | +/− | 20 | GGTAAATGCATGTCCCCCTG | 876 |
| chr3 | 58141897 | 58141916 | +/− | 20 | GTAAATGCATGTCCCCCTGG | 877 |
| chr3 | 58141898 | 58141917 | +/− | 20 | TAAATGCATGTCCCCCTGGA | 878 |
| chr3 | 58141899 | 58141918 | +/− | 20 | AAATGCATGTCCCCCTGGAT | 879 |
| chr3 | 58141900 | 58141919 | +/− | 20 | AATGCATGTCCCCCTGGATT | 880 |
| chr3 | 58141901 | 58141920 | +/− | 20 | ATGCATGTCCCCCTGGATTC | 881 |
| chr3 | 58141902 | 58141921 | +/− | 20 | TGCATGTCCCCCTGGATTCA | 882 |
| chr3 | 58141903 | 58141922 | +/− | 20 | GCATGTCCCCCTGGATTCAG | 883 |
| chr3 | 58141904 | 58141923 | +/− | 20 | CATGTCCCCCTGGATTCAGG | 884 |
| chr3 | 58141905 | 58141924 | +/− | 20 | ATGTCCCCCTGGATTCAGGC | 885 |
| chr3 | 58141906 | 58141925 | +/− | 20 | TGTCCCCCTGGATTCAGGCC | 886 |
| chr3 | 58141907 | 58141926 | +/− | 20 | GTCCCCCTGGATTCAGGCCC | 887 |
| chr3 | 58141908 | 58141927 | +/− | 20 | TCCCCCTGGATTCAGGCCCT | 888 |
| chr3 | 58141909 | 58141928 | +/− | 20 | CCCCCTGGATTCAGGCCCTG | 889 |
| chr3 | 58141910 | 58141929 | +/− | 20 | CCCCTGGATTCAGGCCCTGG | 890 |
| chr3 | 58141911 | 58141930 | +/− | 20 | CCCTGGATTCAGGCCCTGGG | 891 |
| chr3 | 58141912 | 58141931 | +/− | 20 | CCTGGATTCAGGCCCTGGGT | 892 |
| chr3 | 58141913 | 58141932 | +/− | 20 | CTGGATTCAGGCCCTGGGTA | 893 |
| chr3 | 58141914 | 58141933 | +/− | 20 | TGGATTCAGGCCCTGGGTAC | 894 |
| chr3 | 58141915 | 58141934 | +/− | 20 | GGATTCAGGCCCTGGGTACA | 895 |
| chr3 | 58141916 | 58141935 | +/− | 20 | GATTCAGGCCCTGGGTACAA | 896 |
| chr3 | 58141917 | 58141936 | +/− | 20 | ATTCAGGCCCTGGGTACAAT | 897 |
| chr3 | 58141918 | 58141937 | +/− | 20 | TTCAGGCCCTGGGTACAATT | 898 |
| chr3 | 58141919 | 58141938 | +/− | 20 | TCAGGCCCTGGGTACAATTT | 899 |
| chr3 | 58141920 | 58141939 | +/− | 20 | CAGGCCCTGGGTACAATTTT | 900 |
| chr3 | 58141921 | 58141940 | +/− | 20 | AGGCCCTGGGTACAATTTTG | 901 |
| chr3 | 58141922 | 58141941 | +/− | 20 | GGCCCTGGGTACAATTTTGG | 902 |
| chr3 | 58141923 | 58141942 | +/− | 20 | GCCCTGGGTACAATTTTGGT | 903 |
| chr3 | 58141924 | 58141943 | +/− | 20 | CCCTGGGTACAATTTTGGTT | 904 |
| chr3 | 58141925 | 58141944 | +/− | 20 | CCTGGGTACAATTTTGGTTT | 905 |
| chr3 | 58141926 | 58141945 | +/− | 20 | CTGGGTACAATTTTGGTTTT | 906 |
| chr3 | 58141927 | 58141946 | +/− | 20 | TGGGTACAATTTTGGTTTTT | 907 |
| chr3 | 58141928 | 58141947 | +/− | 20 | GGGTACAATTTTGGTTTTTT | 908 |
| chr3 | 58141929 | 58141948 | +/− | 20 | GGTACAATTTTGGTTTTTTC | 909 |
| chr3 | 58141930 | 58141949 | +/− | 20 | GTACAATTTTGGTTTTTTCC | 910 |
| chr3 | 58141931 | 58141950 | +/− | 20 | TACAATTTTGGTTTTTTCCT | 911 |
| chr3 | 58141932 | 58141951 | +/− | 20 | ACAATTTTGGTTTTTTCCTT | 912 |
| chr3 | 58141933 | 58141952 | +/− | 20 | CAATTTTGGTTTTTTCCTTT | 913 |
| chr3 | 58141934 | 58141953 | +/− | 20 | AATTTTGGTTTTTTCCTTTT | 914 |
| chr3 | 58141935 | 58141954 | +/− | 20 | ATTTTGGTTTTTTCCTTTTT | 915 |
| chr3 | 58141936 | 58141955 | +/− | 20 | TTTTGGTTTTTTCCTTTTTG | 916 |
| chr3 | 58141937 | 58141956 | +/− | 20 | TTTGGTTTTTTCCTTTTTGT | 917 |
| chr3 | 58141938 | 58141957 | +/− | 20 | TTGGTTTTTTCCTTTTTGTG | 918 |
| chr3 | 58141939 | 58141958 | +/− | 20 | TGGTTTTTTCCTTTTTGTGT | 919 |
| chr3 | 58141940 | 58141959 | +/− | 20 | GGTTTTTTCCTTTTTGTGTT | 920 |
| chr3 | 58141941 | 58141960 | +/− | 20 | GTTTTTTCCTTTTTGTGTTT | 921 |
| chr3 | 58141942 | 58141961 | +/− | 20 | TTTTTTCCTTTTTGTGTTTC | 922 |
| chr3 | 58141943 | 58141962 | +/− | 20 | TTTTTCCTTTTTGTGTTTCT | 923 |
| chr3 | 58141944 | 58141963 | +/− | 20 | TTTTCCTTTTTGTGTTTCTG | 924 |
| chr3 | 58141945 | 58141964 | +/− | 20 | TTTCCTTTTTGTGTTTCTGT | 925 |
| chr3 | 58141946 | 58141965 | +/− | 20 | TTCCTTTTTGTGTTTCTGTG | 926 |
| chr3 | 58141947 | 58141966 | +/− | 20 | TCCTTTTTGTGTTTCTGTGT | 927 |
| chr3 | 58141948 | 58141967 | +/− | 20 | CCTTTTTGTGTTTCTGTGTT | 928 |
| chr3 | 58141949 | 58141968 | +/− | 20 | CTTTTTGTGTTTCTGTGTTT | 929 |
| chr3 | 58141950 | 58141969 | +/− | 20 | TTTTTGTGTTTCTGTGTTTA | 930 |
| chr3 | 58141951 | 58141970 | +/− | 20 | TTTTGTGTTTCTGTGTTTAC | 931 |
| chr3 | 58141952 | 58141971 | +/− | 20 | TTTGTGTTTCTGTGTTTACT | 932 |
| chr3 | 58141953 | 58141972 | +/− | 20 | TTGTGTTTCTGTGTTTACTC | 933 |
| chr3 | 58141954 | 58141973 | +/− | 20 | TGTGTTTCTGTGTTTACTCA | 934 |
| chr3 | 58141955 | 58141974 | +/− | 20 | GTGTTTCTGTGTTTACTCAG | 935 |
| chr3 | 58141956 | 58141975 | +/− | 20 | TGTTTCTGTGTTTACTCAGC | 936 |
| chr3 | 58141957 | 58141976 | +/− | 20 | GTTTCTGTGTTTACTCAGCC | 937 |
| chr3 | 58141958 | 58141977 | +/− | 20 | TTTCTGTGTTTACTCAGCCT | 938 |
| chr3 | 58141959 | 58141978 | +/− | 20 | TTCTGTGTTTACTCAGCCTT | 939 |
| chr3 | 58141960 | 58141979 | +/− | 20 | TCTGTGTTTACTCAGCCTTC | 940 |
| chr3 | 58141961 | 58141980 | +/− | 20 | CTGTGTTTACTCAGCCTTCA | 941 |
| chr3 | 58141962 | 58141981 | +/− | 20 | TGTGTTTACTCAGCCTTCAT | 942 |
| chr3 | 58141963 | 58141982 | +/− | 20 | GTGTTTACTCAGCCTTCATT | 943 |
| chr3 | 58141964 | 58141983 | +/− | 20 | TGTTTACTCAGCCTTCATTT | 944 |
| chr3 | 58141965 | 58141984 | +/− | 20 | GTTTACTCAGCCTTCATTTC | 945 |
| chr3 | 58141966 | 58141985 | +/− | 20 | TTTACTCAGCCTTCATTTCA | 946 |
| chr3 | 58141967 | 58141986 | +/− | 20 | TTACTCAGCCTTCATTTCAG | 947 |
| chr3 | 58141968 | 58141987 | +/− | 20 | TACTCAGCCTTCATTTCAGA | 948 |
| chr3 | 58141969 | 58141988 | +/− | 20 | ACTCAGCCTTCATTTCAGAA | 949 |
| chr3 | 58141970 | 58141989 | +/− | 20 | CTCAGCCTTCATTTCAGAAA | 950 |
| chr3 | 58141971 | 58141990 | +/− | 20 | TCAGCCTTCATTTCAGAAAA | 951 |
| chr3 | 58141972 | 58141991 | +/− | 20 | CAGCCTTCATTTCAGAAAAT | 952 |
| chr3 | 58141973 | 58141992 | +/− | 20 | AGCCTTCATTTCAGAAAATC | 953 |
| chr3 | 58141974 | 58141993 | +/− | 20 | GCCTTCATTTCAGAAAATCT | 954 |
| chr3 | 58141975 | 58141994 | +/− | 20 | CCTTCATTTCAGAAAATCTG | 955 |
| chr3 | 58141976 | 58141995 | +/− | 20 | CTTCATTTCAGAAAATCTGC | 956 |
| chr3 | 58141977 | 58141996 | +/− | 20 | TTCATTTCAGAAAATCTGCC | 957 |
| chr3 | 58141978 | 58141997 | +/− | 20 | TCATTTCAGAAAATCTGCCA | 958 |
| chr3 | 58141979 | 58141998 | +/− | 20 | CATTTCAGAAAATCTGCCAT | 959 |
| chr3 | 58141980 | 58141999 | +/− | 20 | ATTTCAGAAAATCTGCCATC | 960 |
| chr3 | 58141981 | 58142000 | +/− | 20 | TTTCAGAAAATCTGCCATCT | 961 |
| chr3 | 58141982 | 58142001 | +/− | 20 | TTCAGAAAATCTGCCATCTG | 962 |
| chr3 | 58141983 | 58142002 | +/− | 20 | TCAGAAAATCTGCCATCTGC | 963 |
| chr3 | 58141984 | 58142003 | +/− | 20 | CAGAAAATCTGCCATCTGCT | 964 |
| chr3 | 58141985 | 58142004 | +/− | 20 | AGAAAATCTGCCATCTGCTT | 965 |
| chr3 | 58141986 | 58142005 | +/− | 20 | GAAAATCTGCCATCTGCTTC | 966 |
| chr3 | 58141987 | 58142006 | +/− | 20 | AAAATCTGCCATCTGCTTCT | 967 |
| chr3 | 58141988 | 58142007 | +/− | 20 | AAATCTGCCATCTGCTTCTG | 968 |
| chr3 | 58141989 | 58142008 | +/− | 20 | AATCTGCCATCTGCTTCTGG | 969 |
| chr3 | 58141990 | 58142009 | +/− | 20 | ATCTGCCATCTGCTTCTGGG | 970 |
| chr3 | 58141991 | 58142010 | +/− | 20 | TCTGCCATCTGCTTCTGGGA | 971 |
| chr3 | 58141992 | 58142011 | +/− | 20 | CTGCCATCTGCTTCTGGGAT | 972 |
| chr3 | 58141993 | 58142012 | +/− | 20 | TGCCATCTGCTTCTGGGATT | 973 |
| chr3 | 58141994 | 58142013 | +/− | 20 | GCCATCTGCTTCTGGGATTG | 974 |
| chr3 | 58141995 | 58142014 | +/− | 20 | CCATCTGCTTCTGGGATTGC | 975 |
| chr3 | 58141996 | 58142015 | +/− | 20 | CATCTGCTTCTGGGATTGCT | 976 |
| chr3 | 58141997 | 58142016 | +/− | 20 | ATCTGCTTCTGGGATTGCTT | 977 |
| chr3 | 58141998 | 58142017 | +/− | 20 | TCTGCTTCTGGGATTGCTTA | 978 |
| chr3 | 58141999 | 58142018 | +/− | 20 | CTGCTTCTGGGATTGCTTAA | 979 |
| chr3 | 58142000 | 58142019 | +/− | 20 | TGCTTCTGGGATTGCTTAAG | 980 |
| chr3 | 58142001 | 58142020 | +/− | 20 | GCTTCTGGGATTGCTTAAGC | 981 |
| chr3 | 58142002 | 58142021 | +/− | 20 | CTTCTGGGATTGCTTAAGCC | 982 |
| chr3 | 58142003 | 58142022 | +/− | 20 | TTCTGGGATTGCTTAAGCCC | 983 |
| chr3 | 58142004 | 58142023 | +/− | 20 | TCTGGGATTGCTTAAGCCCT | 984 |
| chr3 | 58142005 | 58142024 | +/− | 20 | CTGGGATTGCTTAAGCCCTG | 985 |
| chr3 | 58142006 | 58142025 | +/− | 20 | TGGGATTGCTTAAGCCCTGT | 986 |
| chr3 | 58142007 | 58142026 | +/− | 20 | GGGATTGCTTAAGCCCTGTG | 987 |
| chr3 | 58142008 | 58142027 | +/− | 20 | GGATTGCTTAAGCCCTGTGG | 988 |
| chr3 | 58142009 | 58142028 | +/− | 20 | GATTGCTTAAGCCCTGTGGG | 989 |
| chr3 | 58142010 | 58142029 | +/− | 20 | ATTGCTTAAGCCCTGTGGGT | 990 |
| chr3 | 58142011 | 58142030 | +/− | 20 | TTGCTTAAGCCCTGTGGGTG | 991 |
| chr3 | 58142012 | 58142031 | +/− | 20 | TGCTTAAGCCCTGTGGGTGT | 992 |
| chr3 | 58142013 | 58142032 | +/− | 20 | GCTTAAGCCCTGTGGGTGTC | 993 |
| chr3 | 58142014 | 58142033 | +/− | 20 | CTTAAGCCCTGTGGGTGTCC | 994 |
| chr3 | 58142015 | 58142034 | +/− | 20 | TTAAGCCCTGTGGGTGTCCT | 995 |
| chr3 | 58142016 | 58142035 | +/− | 20 | TAAGCCCTGTGGGTGTCCTG | 996 |
| chr3 | 58142017 | 58142036 | +/− | 20 | AAGCCCTGTGGGTGTCCTGG | 997 |
| chr3 | 58142018 | 58142037 | +/− | 20 | AGCCCTGTGGGTGTCCTGGT | 998 |
| chr3 | 58142019 | 58142038 | +/− | 20 | GCCCTGTGGGTGTCCTGGTC | 999 |
| chr3 | 58142020 | 58142039 | +/− | 20 | CCCTGTGGGTGTCCTGGTCA | 1000 |
| chr3 | 58142021 | 58142040 | +/− | 20 | CCTGTGGGTGTCCTGGTCAT | 1001 |
| chr3 | 58142022 | 58142041 | +/− | 20 | CTGTGGGTGTCCTGGTCATT | 1002 |
| chr3 | 58142023 | 58142042 | +/− | 20 | TGTGGGTGTCCTGGTCATTG | 1003 |
| chr3 | 58142024 | 58142043 | +/− | 20 | GTGGGTGTCCTGGTCATTGG | 1004 |
| chr3 | 58142025 | 58142044 | +/− | 20 | TGGGTGTCCTGGTCATTGGT | 1005 |

TABLE 7
21-mer target-specific ASOs

| | | | | | | SEQ |
|---|---|---|---|---|---|---|
| | | | | | | ID |
| CHR | START | END | STRAND | kmer | SEQUENCE | NO: |
| chr3 | 58141828 | 58141848 | +/− | 21 | CCCAACTAATCTCCATTTGCC | 1006 |
| chr3 | 58141829 | 58141849 | +/− | 21 | CCAACTAATCTCCATTTGCCA | 1007 |
| chr3 | 58141830 | 58141850 | +/− | 21 | CAACTAATCTCCATTTGCCAC | 1008 |
| chr3 | 58141831 | 58141851 | +/− | 21 | AACTAATCTCCATTTGCCACT | 1009 |
| chr3 | 58141832 | 58141852 | +/− | 21 | ACTAATCTCCATTTGCCACTG | 1010 |
| chr3 | 58141833 | 58141853 | +/− | 21 | CTAATCTCCATTTGCCACTGA | 1011 |
| chr3 | 58141834 | 58141854 | +/− | 21 | TAATCTCCATTTGCCACTGAC | 1012 |
| chr3 | 58141835 | 58141855 | +/− | 21 | AATCTCCATTTGCCACTGACC | 1013 |
| chr3 | 58141836 | 58141856 | +/− | 21 | ATCTCCATTTGCCACTGACCA | 1014 |
| chr3 | 58141837 | 58141857 | +/− | 21 | TCTCCATTTGCCACTGACCAG | 1015 |
| chr3 | 58141838 | 58141858 | +/− | 21 | CTCCATTTGCCACTGACCAGG | 1016 |
| chr3 | 58141839 | 58141859 | +/− | 21 | TCCATTTGCCACTGACCAGGC | 1017 |
| chr3 | 58141840 | 58141860 | +/− | 21 | CCATTTGCCACTGACCAGGCC | 1018 |
| chr3 | 58141841 | 58141861 | +/− | 21 | CATTTGCCACTGACCAGGCCA | 1019 |
| chr3 | 58141842 | 58141862 | +/− | 21 | ATTTGCCACTGACCAGGCCAC | 1020 |
| chr3 | 58141843 | 58141863 | +/− | 21 | TTTGCCACTGACCAGGCCACA | 1021 |
| chr3 | 58141844 | 58141864 | +/− | 21 | TTGCCACTGACCAGGCCACAG | 1022 |
| chr3 | 58141845 | 58141865 | +/− | 21 | TGCCACTGACCAGGCCACAGA | 1023 |
| chr3 | 58141846 | 58141866 | +/− | 21 | GCCACTGACCAGGCCACAGAT | 1024 |
| chr3 | 58141847 | 58141867 | +/− | 21 | CCACTGACCAGGCCACAGATG | 1025 |
| chr3 | 58141848 | 58141868 | +/− | 21 | CACTGACCAGGCCACAGATGG | 1026 |
| chr3 | 58141849 | 58141869 | +/− | 21 | ACTGACCAGGCCACAGATGGG | 1027 |
| chr3 | 58141850 | 58141870 | +/− | 21 | CTGACCAGGCCACAGATGGGG | 1028 |
| chr3 | 58141851 | 58141871 | +/− | 21 | TGACCAGGCCACAGATGGGGA | 1029 |
| chr3 | 58141852 | 58141872 | +/− | 21 | GACCAGGCCACAGATGGGGAA | 1030 |
| chr3 | 58141853 | 58141873 | +/− | 21 | ACCAGGCCACAGATGGGGAAG | 1031 |
| chr3 | 58141854 | 58141874 | +/− | 21 | CCAGGCCACAGATGGGGAAGT | 1032 |
| chr3 | 58141855 | 58141875 | +/− | 21 | CAGGCCACAGATGGGGAAGTC | 1033 |
| chr3 | 58141856 | 58141876 | +/− | 21 | AGGCCACAGATGGGGAAGTCA | 1034 |
| chr3 | 58141857 | 58141877 | +/− | 21 | GGCCACAGATGGGGAAGTCAC | 1035 |
| chr3 | 58141858 | 58141878 | +/− | 21 | GCCACAGATGGGGAAGTCACA | 1036 |
| chr3 | 58141859 | 58141879 | +/− | 21 | CCACAGATGGGGAAGTCACAG | 1037 |
| chr3 | 58141860 | 58141880 | +/− | 21 | CACAGATGGGGAAGTCACAGC | 1038 |
| chr3 | 58141861 | 58141881 | +/− | 21 | ACAGATGGGGAAGTCACAGCC | 1039 |
| chr3 | 58141862 | 58141882 | +/− | 21 | CAGATGGGGAAGTCACAGCCG | 1040 |
| chr3 | 58141863 | 58141883 | +/− | 21 | AGATGGGGAAGTCACAGCCGT | 1041 |
| chr3 | 58141864 | 58141884 | +/− | 21 | GATGGGGAAGTCACAGCCGTG | 1042 |
| chr3 | 58141865 | 58141885 | +/− | 21 | ATGGGGAAGTCACAGCCGTGG | 1043 |
| chr3 | 58141866 | 58141886 | +/− | 21 | TGGGGAAGTCACAGCCGTGGA | 1044 |
| chr3 | 58141867 | 58141887 | +/− | 21 | GGGGAAGTCACAGCCGTGGAG | 1045 |
| chr3 | 58141868 | 58141888 | +/− | 21 | GGGAAGTCACAGCCGTGGAGG | 1046 |
| chr3 | 58141869 | 58141889 | +/− | 21 | GGAAGTCACAGCCGTGGAGGA | 1047 |
| chr3 | 58141870 | 58141890 | +/− | 21 | GAAGTCACAGCCGTGGAGGAG | 1048 |
| chr3 | 58141871 | 58141891 | +/− | 21 | AAGTCACAGCCGTGGAGGAGG | 1049 |
| chr3 | 58141872 | 58141892 | +/− | 21 | AGTCACAGCCGTGGAGGAGGC | 1050 |
| chr3 | 58141873 | 58141893 | +/− | 21 | GTCACAGCCGTGGAGGAGGCA | 1051 |
| chr3 | 58141874 | 58141894 | +/− | 21 | TCACAGCCGTGGAGGAGGCAC | 1052 |
| chr3 | 58141875 | 58141895 | +/− | 21 | CACAGCCGTGGAGGAGGCACC | 1053 |
| chr3 | 58141876 | 58141896 | +/− | 21 | ACAGCCGTGGAGGAGGCACCG | 1054 |
| chr3 | 58141877 | 58141897 | +/− | 21 | CAGCCGTGGAGGAGGCACCGG | 1055 |
| chr3 | 58141878 | 58141898 | +/− | 21 | AGCCGTGGAGGAGGCACCGGT | 1056 |
| chr3 | 58141879 | 58141899 | +/− | 21 | GCCGTGGAGGAGGCACCGGTA | 1057 |
| chr3 | 58141880 | 58141900 | +/− | 21 | CCGTGGAGGAGGCACCGGTAA | 1058 |
| chr3 | 58141881 | 58141901 | +/− | 21 | CGTGGAGGAGGCACCGGTAAA | 1059 |
| chr3 | 58141882 | 58141902 | +/− | 21 | GTGGAGGAGGCACCGGTAAAT | 1060 |
| chr3 | 58141883 | 58141903 | +/− | 21 | TGGAGGAGGCACCGGTAAATG | 1061 |
| chr3 | 58141884 | 58141904 | +/− | 21 | GGAGGAGGCACCGGTAAATGC | 1062 |
| chr3 | 58141885 | 58141905 | +/− | 21 | GAGGAGGCACCGGTAAATGCA | 1063 |
| chr3 | 58141886 | 58141906 | +/− | 21 | AGGAGGCACCGGTAAATGCAT | 1064 |
| chr3 | 58141887 | 58141907 | +/− | 21 | GGAGGCACCGGTAAATGCATG | 1065 |
| chr3 | 58141888 | 58141908 | +/− | 21 | GAGGCACCGGTAAATGCATGT | 1066 |
| chr3 | 58141889 | 58141909 | +/− | 21 | AGGCACCGGTAAATGCATGTC | 1067 |
| chr3 | 58141890 | 58141910 | +/− | 21 | GGCACCGGTAAATGCATGTCC | 1068 |
| chr3 | 58141891 | 58141911 | +/− | 21 | GCACCGGTAAATGCATGTCCC | 1069 |
| chr3 | 58141892 | 58141912 | +/− | 21 | CACCGGTAAATGCATGTCCCC | 1070 |
| chr3 | 58141893 | 58141913 | +/− | 21 | ACCGGTAAATGCATGTCCCCC | 1071 |
| chr3 | 58141894 | 58141914 | +/− | 21 | CCGGTAAATGCATGTCCCCCT | 1072 |
| chr3 | 58141895 | 58141915 | +/− | 21 | CGGTAAATGCATGTCCCCCTG | 1073 |
| chr3 | 58141896 | 58141916 | +/− | 21 | GGTAAATGCATGTCCCCCTGG | 1074 |
| chr3 | 58141897 | 58141917 | +/− | 21 | GTAAATGCATGTCCCCCTGGA | 1075 |
| chr3 | 58141898 | 58141918 | +/− | 21 | TAAATGCATGTCCCCCTGGAT | 1076 |
| chr3 | 58141899 | 58141919 | +/− | 21 | AAATGCATGTCCCCCTGGATT | 1077 |
| chr3 | 58141900 | 58141920 | +/− | 21 | AATGCATGTCCCCCTGGATTC | 1078 |
| chr3 | 58141901 | 58141921 | +/− | 21 | ATGCATGTCCCCCTGGATTCA | 1079 |
| chr3 | 58141902 | 58141922 | +/− | 21 | TGCATGTCCCCCTGGATTCAG | 1080 |
| chr3 | 58141903 | 58141923 | +/− | 21 | GCATGTCCCCCTGGATTCAGG | 1081 |
| chr3 | 58141904 | 58141924 | +/− | 21 | CATGTCCCCCTGGATTCAGGC | 1082 |
| chr3 | 58141905 | 58141925 | +/− | 21 | ATGTCCCCCTGGATTCAGGCC | 1083 |
| chr3 | 58141906 | 58141926 | +/− | 21 | TGTCCCCCTGGATTCAGGCCC | 1084 |
| chr3 | 58141907 | 58141927 | +/− | 21 | GTCCCCCTGGATTCAGGCCCT | 1085 |
| chr3 | 58141908 | 58141928 | +/− | 21 | TCCCCCTGGATTCAGGCCCTG | 1086 |
| chr3 | 58141909 | 58141929 | +/− | 21 | CCCCCTGGATTCAGGCCCTGG | 1087 |
| chr3 | 58141910 | 58141930 | +/− | 21 | CCCCTGGATTCAGGCCCTGGG | 1088 |
| chr3 | 58141911 | 58141931 | +/− | 21 | CCCTGGATTCAGGCCCTGGGT | 1089 |
| chr3 | 58141912 | 58141932 | +/− | 21 | CCTGGATTCAGGCCCTGGGTA | 1090 |
| chr3 | 58141913 | 58141933 | +/− | 21 | CTGGATTCAGGCCCTGGGTAC | 1091 |
| chr3 | 58141914 | 58141934 | +/− | 21 | TGGATTCAGGCCCTGGGTACA | 1092 |
| chr3 | 58141915 | 58141935 | +/− | 21 | GGATTCAGGCCCTGGGTACAA | 1093 |
| chr3 | 58141916 | 58141936 | +/− | 21 | GATTCAGGCCCTGGGTACAAT | 1094 |
| chr3 | 58141917 | 58141937 | +/− | 21 | ATTCAGGCCCTGGGTACAATT | 1095 |
| chr3 | 58141918 | 58141938 | +/− | 21 | TTCAGGCCCTGGGTACAATTT | 1096 |
| chr3 | 58141919 | 58141939 | +/− | 21 | TCAGGCCCTGGGTACAATTTT | 1097 |
| chr3 | 58141920 | 58141940 | +/− | 21 | CAGGCCCTGGGTACAATTTTG | 1098 |
| chr3 | 58141921 | 58141941 | +/− | 21 | AGGCCCTGGGTACAATTTTGG | 1099 |
| chr3 | 58141922 | 58141942 | +/− | 21 | GGCCCTGGGTACAATTTTGGT | 1100 |
| chr3 | 58141923 | 58141943 | +/− | 21 | GCCCTGGGTACAATTTTGGTT | 1101 |
| chr3 | 58141924 | 58141944 | +/− | 21 | CCCTGGGTACAATTTTGGTTT | 1102 |
| chr3 | 58141925 | 58141945 | +/− | 21 | CCTGGGTACAATTTTGGTTTT | 1103 |
| chr3 | 58141926 | 58141946 | +/− | 21 | CTGGGTACAATTTTGGTTTTT | 1104 |
| chr3 | 58141927 | 58141947 | +/− | 21 | TGGGTACAATTTTGGTTTTTT | 1105 |
| chr3 | 58141928 | 58141948 | +/− | 21 | GGGTACAATTTTGGTTTTTTC | 1106 |
| chr3 | 58141929 | 58141949 | +/− | 21 | GGTACAATTTTGGTTTTTTCC | 1107 |
| chr3 | 58141930 | 58141950 | +/− | 21 | GTACAATTTTGGTTTTTTCCT | 1108 |
| chr3 | 58141931 | 58141951 | +/− | 21 | TACAATTTTGGTTTTTTCCTT | 1109 |
| chr3 | 58141932 | 58141952 | +/− | 21 | ACAATTTTGGTTTTTTCCTTT | 1110 |
| chr3 | 58141933 | 58141953 | +/− | 21 | CAATTTTGGTTTTTTCCTTTT | 1111 |
| chr3 | 58141934 | 58141954 | +/− | 21 | AATTTTGGTTTTTTCCTTTTT | 1112 |
| chr3 | 58141935 | 58141955 | +/− | 21 | ATTTTGGTTTTTTCCTTTTTG | 1113 |
| chr3 | 58141936 | 58141956 | +/− | 21 | TTTTGGTTTTTTCCTTTTTGT | 1114 |
| chr3 | 58141937 | 58141957 | +/− | 21 | TTTGGTTTTTTCCTTTTTGTG | 1115 |
| chr3 | 58141938 | 58141958 | +/− | 21 | TTGGTTTTTTCCTTTTTGTGT | 1116 |
| chr3 | 58141939 | 58141959 | +/− | 21 | TGGTTTTTTCCTTTTTGTGTT | 1117 |
| chr3 | 58141940 | 58141960 | +/− | 21 | GGTTTTTTCCTTTTTGTGTTT | 1118 |
| chr3 | 58141941 | 58141961 | +/− | 21 | GTTTTTTCCTTTTTGTGTTTC | 1119 |
| chr3 | 58141942 | 58141962 | +/− | 21 | TTTTTTCCTTTTTGTGTTTCT | 1120 |
| chr3 | 58141943 | 58141963 | +/− | 21 | TTTTTCCTTTTTGTGTTTCTG | 1121 |
| chr3 | 58141944 | 58141964 | +/− | 21 | TTTTCCTTTTTGTGTTTCTGT | 1122 |
| chr3 | 58141945 | 58141965 | +/− | 21 | TTTCCTTTTTGTGTTTCTGTG | 1123 |
| chr3 | 58141946 | 58141966 | +/− | 21 | TTCCTTTTTGTGTTTCTGTGT | 1124 |
| chr3 | 58141947 | 58141967 | +/− | 21 | TCCTTTTTGTGTTTCTGTGTT | 1125 |
| chr3 | 58141948 | 58141968 | +/− | 21 | CCTTTTTGTGTTTCTGTGTTT | 1126 |
| chr3 | 58141949 | 58141969 | +/− | 21 | CTTTTTGTGTTTCTGTGTTTA | 1127 |
| chr3 | 58141950 | 58141970 | +/− | 21 | TTTTTGTGTTTCTGTGTTTAC | 1128 |
| chr3 | 58141951 | 58141971 | +/− | 21 | TTTTGTGTTTCTGTGTTTACT | 1129 |
| chr3 | 58141952 | 58141972 | +/− | 21 | TTTGTGTTTCTGTGTTTACTC | 1130 |
| chr3 | 58141953 | 58141973 | +/− | 21 | TTGTGTTTCTGTGTTTACTCA | 1131 |
| chr3 | 58141954 | 58141974 | +/− | 21 | TGTGTTTCTGTGTTTACTCAG | 1132 |
| chr3 | 58141955 | 58141975 | +/− | 21 | GTGTTTCTGTGTTTACTCAGC | 1133 |
| chr3 | 58141956 | 58141976 | +/− | 21 | TGTTTCTGTGTTTACTCAGCC | 1134 |
| chr3 | 58141957 | 58141977 | +/− | 21 | GTTTCTGTGTTTACTCAGCCT | 1135 |
| chr3 | 58141958 | 58141978 | +/− | 21 | TTTCTGTGTTTACTCAGCCTT | 1136 |
| chr3 | 58141959 | 58141979 | +/− | 21 | TTCTGTGTTTACTCAGCCTTC | 1137 |
| chr3 | 58141960 | 58141980 | +/− | 21 | TCTGTGTTTACTCAGCCTTCA | 1138 |
| chr3 | 58141961 | 58141981 | +/− | 21 | CTGTGTTTACTCAGCCTTCAT | 1139 |
| chr3 | 58141962 | 58141982 | +/− | 21 | TGTGTTTACTCAGCCTTCATT | 1140 |
| chr3 | 58141963 | 58141983 | +/− | 21 | GTGTTTACTCAGCCTTCATTT | 1141 |
| chr3 | 58141964 | 58141984 | +/− | 21 | TGTTTACTCAGCCTTCATTTC | 1142 |
| chr3 | 58141965 | 58141985 | +/− | 21 | GTTTACTCAGCCTTCATTTCA | 1143 |
| chr3 | 58141966 | 58141986 | +/− | 21 | TTTACTCAGCCTTCATTTCAG | 1144 |
| chr3 | 58141967 | 58141987 | +/− | 21 | TTACTCAGCCTTCATTTCAGA | 1145 |
| chr3 | 58141968 | 58141988 | +/− | 21 | TACTCAGCCTTCATTTCAGAA | 1146 |
| chr3 | 58141969 | 58141989 | +/− | 21 | ACTCAGCCTTCATTTCAGAAA | 1147 |
| chr3 | 58141970 | 58141990 | +/− | 21 | CTCAGCCTTCATTTCAGAAAA | 1148 |
| chr3 | 58141971 | 58141991 | +/− | 21 | TCAGCCTTCATTTCAGAAAAT | 1149 |
| chr3 | 58141972 | 58141992 | +/− | 21 | CAGCCTTCATTTCAGAAAATC | 1150 |
| chr3 | 58141973 | 58141993 | +/− | 21 | AGCCTTCATTTCAGAAAATCT | 1151 |
| chr3 | 58141974 | 58141994 | +/− | 21 | GCCTTCATTTCAGAAAATCTG | 1152 |
| chr3 | 58141975 | 58141995 | +/− | 21 | CCTTCATTTCAGAAAATCTGC | 1153 |
| chr3 | 58141976 | 58141996 | +/− | 21 | CTTCATTTCAGAAAATCTGCC | 1154 |
| chr3 | 58141977 | 58141997 | +/− | 21 | TTCATTTCAGAAAATCTGCCA | 1155 |
| chr3 | 58141978 | 58141998 | +/− | 21 | TCATTTCAGAAAATCTGCCAT | 1156 |
| chr3 | 58141979 | 58141999 | +/− | 21 | CATTTCAGAAAATCTGCCATC | 1157 |
| chr3 | 58141980 | 58142000 | +/− | 21 | ATTTCAGAAAATCTGCCATCT | 1158 |
| chr3 | 58141981 | 58142001 | +/− | 21 | TTTCAGAAAATCTGCCATCTG | 1159 |
| chr3 | 58141982 | 58142002 | +/− | 21 | TTCAGAAAATCTGCCATCTGC | 1160 |
| chr3 | 58141983 | 58142003 | +/− | 21 | TCAGAAAATCTGCCATCTGCT | 1161 |
| chr3 | 58141984 | 58142004 | +/− | 21 | CAGAAAATCTGCCATCTGCTT | 1162 |
| chr3 | 58141985 | 58142005 | +/− | 21 | AGAAAATCTGCCATCTGCTTC | 1163 |
| chr3 | 58141986 | 58142006 | +/− | 21 | GAAAATCTGCCATCTGCTTCT | 1164 |
| chr3 | 58141987 | 58142007 | +/− | 21 | AAAATCTGCCATCTGCTTCTG | 1165 |
| chr3 | 58141988 | 58142008 | +/− | 21 | AAATCTGCCATCTGCTTCTGG | 1166 |
| chr3 | 58141989 | 58142009 | +/− | 21 | AATCTGCCATCTGCTTCTGGG | 1167 |
| chr3 | 58141990 | 58142010 | +/− | 21 | ATCTGCCATCTGCTTCTGGGA | 1168 |
| chr3 | 58141991 | 58142011 | +/− | 21 | TCTGCCATCTGCTTCTGGGAT | 1169 |
| chr3 | 58141992 | 58142012 | +/− | 21 | CTGCCATCTGCTTCTGGGATT | 1170 |
| chr3 | 58141993 | 58142013 | +/− | 21 | TGCCATCTGCTTCTGGGATTG | 1171 |
| chr3 | 58141994 | 58142014 | +/− | 21 | GCCATCTGCTTCTGGGATTGC | 1172 |
| chr3 | 58141995 | 58142015 | +/− | 21 | CCATCTGCTTCTGGGATTGCT | 1173 |
| chr3 | 58141996 | 58142016 | +/− | 21 | CATCTGCTTCTGGGATTGCTT | 1174 |
| chr3 | 58141997 | 58142017 | +/− | 21 | ATCTGCTTCTGGGATTGCTTA | 1175 |
| chr3 | 58141998 | 58142018 | +/− | 21 | TCTGCTTCTGGGATTGCTTAA | 1176 |
| chr3 | 58141999 | 58142019 | +/− | 21 | CTGCTTCTGGGATTGCTTAAG | 1177 |
| chr3 | 58142000 | 58142020 | +/− | 21 | TGCTTCTGGGATTGCTTAAGC | 1178 |
| chr3 | 58142001 | 58142021 | +/− | 21 | GCTTCTGGGATTGCTTAAGCC | 1179 |
| chr3 | 58142002 | 58142022 | +/− | 21 | CTTCTGGGATTGCTTAAGCCC | 1180 |
| chr3 | 58142003 | 58142023 | +/− | 21 | TTCTGGGATTGCTTAAGCCCT | 1181 |
| chr3 | 58142004 | 58142024 | +/− | 21 | TCTGGGATTGCTTAAGCCCTG | 1182 |
| chr3 | 58142005 | 58142025 | +/− | 21 | CTGGGATTGCTTAAGCCCTGT | 1183 |
| chr3 | 58142006 | 58142026 | +/− | 21 | TGGGATTGCTTAAGCCCTGTG | 1184 |
| chr3 | 58142007 | 58142027 | +/− | 21 | GGGATTGCTTAAGCCCTGTGG | 1185 |
| chr3 | 58142008 | 58142028 | +/− | 21 | GGATTGCTTAAGCCCTGTGGG | 1186 |
| chr3 | 58142009 | 58142029 | +/− | 21 | GATTGCTTAAGCCCTGTGGGT | 1187 |
| chr3 | 58142010 | 58142030 | +/− | 21 | ATTGCTTAAGCCCTGTGGGTG | 1188 |
| chr3 | 58142011 | 58142031 | +/− | 21 | TTGCTTAAGCCCTGTGGGTGT | 1189 |
| chr3 | 58142012 | 58142032 | +/− | 21 | TGCTTAAGCCCTGTGGGTGTC | 1190 |
| chr3 | 58142013 | 58142033 | +/− | 21 | GCTTAAGCCCTGTGGGTGTCC | 1191 |
| chr3 | 58142014 | 58142034 | +/− | 21 | CTTAAGCCCTGTGGGTGTCCT | 1192 |
| chr3 | 58142015 | 58142035 | +/− | 21 | TTAAGCCCTGTGGGTGTCCTG | 1193 |
| chr3 | 58142016 | 58142036 | +/− | 21 | TAAGCCCTGTGGGTGTCCTGG | 1194 |
| chr3 | 58142017 | 58142037 | +/− | 21 | AAGCCCTGTGGGTGTCCTGGT | 1195 |
| chr3 | 58142018 | 58142038 | +/− | 21 | AGCCCTGTGGGTGTCCTGGTC | 1196 |
| chr3 | 58142019 | 58142039 | +/− | 21 | GCCCTGTGGGTGTCCTGGTCA | 1197 |
| chr3 | 58142020 | 58142040 | +/− | 21 | CCCTGTGGGTGTCCTGGTCAT | 1198 |
| chr3 | 58142021 | 58142041 | +/− | 21 | CCTGTGGGTGTCCTGGTCATT | 1199 |
| chr3 | 58142022 | 58142042 | +/− | 21 | CTGTGGGTGTCCTGGTCATTG | 1200 |
| chr3 | 58142023 | 58142043 | +/− | 21 | TGTGGGTGTCCTGGTCATTGG | 1201 |
| chr3 | 58142024 | 58142044 | +/− | 21 | GTGGGTGTCCTGGTCATTGGT | 1202 |

TABLE 8
22-mer target-specific ASOs

| | | | | | | SEQ |
|---|---|---|---|---|---|---|
| | | | | | | ID |
| CHR | START | END | STRAND | kmer | SEQUENCE | NO: |
| chr3 | 58141828 | 58141849 | +/− | 22 | CCCAACTAATCTCCATTTGCCA | 1203 |
| chr3 | 58141829 | 58141850 | +/− | 22 | CCAACTAATCTCCATTTGCCAC | 1204 |
| chr3 | 58141830 | 58141851 | +/− | 22 | CAACTAATCTCCATTTGCCACT | 1205 |
| chr3 | 58141831 | 58141852 | +/− | 22 | AACTAATCTCCATTTGCCACTG | 1206 |
| chr3 | 58141832 | 58141853 | +/− | 22 | ACTAATCTCCATTTGCCACTGA | 1207 |
| chr3 | 58141833 | 58141854 | +/− | 22 | CTAATCTCCATTTGCCACTGAC | 1208 |
| chr3 | 58141834 | 58141855 | +/− | 22 | TAATCTCCATTTGCCACTGACC | 1209 |
| chr3 | 58141835 | 58141856 | +/− | 22 | AATCTCCATTTGCCACTGACCA | 1210 |
| chr3 | 58141836 | 58141857 | +/− | 22 | ATCTCCATTTGCCACTGACCAG | 1211 |
| chr3 | 58141837 | 58141858 | +/− | 22 | TCTCCATTTGCCACTGACCAGG | 1212 |
| chr3 | 58141838 | 58141859 | +/− | 22 | CTCCATTTGCCACTGACCAGGC | 1213 |
| chr3 | 58141839 | 58141860 | +/− | 22 | TCCATTTGCCACTGACCAGGCC | 1214 |
| chr3 | 58141840 | 58141861 | +/− | 22 | CCATTTGCCACTGACCAGGCCA | 1215 |
| chr3 | 58141841 | 58141862 | +/− | 22 | CATTTGCCACTGACCAGGCCAC | 1216 |
| chr3 | 58141842 | 58141863 | +/− | 22 | ATTTGCCACTGACCAGGCCACA | 1217 |
| chr3 | 58141843 | 58141864 | +/− | 22 | TTTGCCACTGACCAGGCCACAG | 1218 |
| chr3 | 58141844 | 58141865 | +/− | 22 | TTGCCACTGACCAGGCCACAGA | 1219 |
| chr3 | 58141845 | 58141866 | +/− | 22 | TGCCACTGACCAGGCCACAGAT | 1220 |
| chr3 | 58141846 | 58141867 | +/− | 22 | GCCACTGACCAGGCCACAGATG | 1221 |
| chr3 | 58141847 | 58141868 | +/− | 22 | CCACTGACCAGGCCACAGATGG | 1222 |
| chr3 | 58141848 | 58141869 | +/− | 22 | CACTGACCAGGCCACAGATGGG | 1223 |
| chr3 | 58141849 | 58141870 | +/− | 22 | ACTGACCAGGCCACAGATGGGG | 1224 |
| chr3 | 58141850 | 58141871 | +/− | 22 | CTGACCAGGCCACAGATGGGGA | 1225 |
| chr3 | 58141851 | 58141872 | +/− | 22 | TGACCAGGCCACAGATGGGGAA | 1226 |
| chr3 | 58141852 | 58141873 | +/− | 22 | GACCAGGCCACAGATGGGGAAG | 1227 |
| chr3 | 58141853 | 58141874 | +/− | 22 | ACCAGGCCACAGATGGGGAAGT | 1228 |
| chr3 | 58141854 | 58141875 | +/− | 22 | CCAGGCCACAGATGGGGAAGTC | 1229 |
| chr3 | 58141855 | 58141876 | +/− | 22 | CAGGCCACAGATGGGGAAGTCA | 1230 |
| chr3 | 58141856 | 58141877 | +/− | 22 | AGGCCACAGATGGGGAAGTCAC | 1231 |
| chr3 | 58141857 | 58141878 | +/− | 22 | GGCCACAGATGGGGAAGTCACA | 1232 |
| chr3 | 58141858 | 58141879 | +/− | 22 | GCCACAGATGGGGAAGTCACAG | 1233 |
| chr3 | 58141859 | 58141880 | +/− | 22 | CCACAGATGGGGAAGTCACAGC | 1234 |
| chr3 | 58141860 | 58141881 | +/− | 22 | CACAGATGGGGAAGTCACAGCC | 1235 |
| chr3 | 58141861 | 58141882 | +/− | 22 | ACAGATGGGGAAGTCACAGCCG | 1236 |
| chr3 | 58141862 | 58141883 | +/− | 22 | CAGATGGGGAAGTCACAGCCGT | 1237 |
| chr3 | 58141863 | 58141884 | +/− | 22 | AGATGGGGAAGTCACAGCCGTG | 1238 |
| chr3 | 58141864 | 58141885 | +/− | 22 | GATGGGGAAGTCACAGCCGTGG | 1239 |
| chr3 | 58141865 | 58141886 | +/− | 22 | ATGGGGAAGTCACAGCCGTGGA | 1240 |
| chr3 | 58141866 | 58141887 | +/− | 22 | TGGGGAAGTCACAGCCGTGGAG | 1241 |
| chr3 | 58141867 | 58141888 | +/− | 22 | GGGGAAGTCACAGCCGTGGAGG | 1242 |
| chr3 | 58141868 | 58141889 | +/− | 22 | GGGAAGTCACAGCCGTGGAGGA | 1243 |
| chr3 | 58141869 | 58141890 | +/− | 22 | GGAAGTCACAGCCGTGGAGGAG | 1244 |
| chr3 | 58141870 | 58141891 | +/− | 22 | GAAGTCACAGCCGTGGAGGAGG | 1245 |
| chr3 | 58141871 | 58141892 | +/− | 22 | AAGTCACAGCCGTGGAGGAGGC | 1246 |
| chr3 | 58141872 | 58141893 | +/− | 22 | AGTCACAGCCGTGGAGGAGGCA | 1247 |
| chr3 | 58141873 | 58141894 | +/− | 22 | GTCACAGCCGTGGAGGAGGCAC | 1248 |
| chr3 | 58141874 | 58141895 | +/− | 22 | TCACAGCCGTGGAGGAGGCACC | 1249 |
| chr3 | 58141875 | 58141896 | +/− | 22 | CACAGCCGTGGAGGAGGCACCG | 1250 |
| chr3 | 58141876 | 58141897 | +/− | 22 | ACAGCCGTGGAGGAGGCACCGG | 1251 |
| chr3 | 58141877 | 58141898 | +/− | 22 | CAGCCGTGGAGGAGGCACCGGT | 1252 |
| chr3 | 58141878 | 58141899 | +/− | 22 | AGCCGTGGAGGAGGCACCGGTA | 1253 |
| chr3 | 58141879 | 58141900 | +/− | 22 | GCCGTGGAGGAGGCACCGGTAA | 1254 |
| chr3 | 58141880 | 58141901 | +/− | 22 | CCGTGGAGGAGGCACCGGTAAA | 1255 |
| chr3 | 58141881 | 58141902 | +/− | 22 | CGTGGAGGAGGCACCGGTAAAT | 1256 |
| chr3 | 58141882 | 58141903 | +/− | 22 | GTGGAGGAGGCACCGGTAAATG | 1257 |
| chr3 | 58141883 | 58141904 | +/− | 22 | TGGAGGAGGCACCGGTAAATGC | 1258 |
| chr3 | 58141884 | 58141905 | +/− | 22 | GGAGGAGGCACCGGTAAATGCA | 1259 |
| chr3 | 58141885 | 58141906 | +/− | 22 | GAGGAGGCACCGGTAAATGCAT | 1260 |
| chr3 | 58141886 | 58141907 | +/− | 22 | AGGAGGCACCGGTAAATGCATG | 1261 |
| chr3 | 58141887 | 58141908 | +/− | 22 | GGAGGCACCGGTAAATGCATGT | 1262 |
| chr3 | 58141888 | 58141909 | +/− | 22 | GAGGCACCGGTAAATGCATGTC | 1263 |
| chr3 | 58141889 | 58141910 | +/− | 22 | AGGCACCGGTAAATGCATGTCC | 1264 |
| chr3 | 58141890 | 58141911 | +/− | 22 | GGCACCGGTAAATGCATGTCCC | 1265 |
| chr3 | 58141891 | 58141912 | +/− | 22 | GCACCGGTAAATGCATGTCCCC | 1266 |
| chr3 | 58141892 | 58141913 | +/− | 22 | CACCGGTAAATGCATGTCCCCC | 1267 |
| chr3 | 58141893 | 58141914 | +/− | 22 | ACCGGTAAATGCATGTCCCCCT | 1268 |
| chr3 | 58141894 | 58141915 | +/− | 22 | CCGGTAAATGCATGTCCCCCTG | 1269 |
| chr3 | 58141895 | 58141916 | +/− | 22 | CGGTAAATGCATGTCCCCCTGG | 1270 |
| chr3 | 58141896 | 58141917 | +/− | 22 | GGTAAATGCATGTCCCCCTGGA | 1271 |
| chr3 | 58141897 | 58141918 | +/− | 22 | GTAAATGCATGTCCCCCTGGAT | 1272 |
| chr3 | 58141898 | 58141919 | +/− | 22 | TAAATGCATGTCCCCCTGGATT | 1273 |
| chr3 | 58141899 | 58141920 | +/− | 22 | AAATGCATGTCCCCCTGGATTC | 1274 |
| chr3 | 58141900 | 58141921 | +/− | 22 | AATGCATGTCCCCCTGGATTCA | 1275 |
| chr3 | 58141901 | 58141922 | +/− | 22 | ATGCATGTCCCCCTGGATTCAG | 1276 |
| chr3 | 58141902 | 58141923 | +/− | 22 | TGCATGTCCCCCTGGATTCAGG | 1277 |
| chr3 | 58141903 | 58141924 | +/− | 22 | GCATGTCCCCCTGGATTCAGGC | 1278 |
| chr3 | 58141904 | 58141925 | +/− | 22 | CATGTCCCCCTGGATTCAGGCC | 1279 |
| chr3 | 58141905 | 58141926 | +/− | 22 | ATGTCCCCCTGGATTCAGGCCC | 1280 |
| chr3 | 58141906 | 58141927 | +/− | 22 | TGTCCCCCTGGATTCAGGCCCT | 1281 |
| chr3 | 58141907 | 58141928 | +/− | 22 | GTCCCCCTGGATTCAGGCCCTG | 1282 |
| chr3 | 58141908 | 58141929 | +/− | 22 | TCCCCCTGGATTCAGGCCCTGG | 1283 |
| chr3 | 58141909 | 58141930 | +/− | 22 | CCCCCTGGATTCAGGCCCTGGG | 1284 |
| chr3 | 58141910 | 58141931 | +/− | 22 | CCCCTGGATTCAGGCCCTGGGT | 1285 |
| chr3 | 58141911 | 58141932 | +/− | 22 | CCCTGGATTCAGGCCCTGGGTA | 1286 |
| chr3 | 58141912 | 58141933 | +/− | 22 | CCTGGATTCAGGCCCTGGGTAC | 1287 |
| chr3 | 58141913 | 58141934 | +/− | 22 | CTGGATTCAGGCCCTGGGTACA | 1288 |
| chr3 | 58141914 | 58141935 | +/− | 22 | TGGATTCAGGCCCTGGGTACAA | 1289 |
| chr3 | 58141915 | 58141936 | +/− | 22 | GGATTCAGGCCCTGGGTACAAT | 1290 |
| chr3 | 58141916 | 58141937 | +/− | 22 | GATTCAGGCCCTGGGTACAATT | 1291 |
| chr3 | 58141917 | 58141938 | +/− | 22 | ATTCAGGCCCTGGGTACAATTT | 1292 |
| chr3 | 58141918 | 58141939 | +/− | 22 | TTCAGGCCCTGGGTACAATTTT | 1293 |
| chr3 | 58141919 | 58141940 | +/− | 22 | TCAGGCCCTGGGTACAATTTTG | 1294 |
| chr3 | 58141920 | 58141941 | +/− | 22 | CAGGCCCTGGGTACAATTTTGG | 1295 |
| chr3 | 58141921 | 58141942 | +/− | 22 | AGGCCCTGGGTACAATTTTGGT | 1296 |
| chr3 | 58141922 | 58141943 | +/− | 22 | GGCCCTGGGTACAATTTTGGTT | 1297 |
| chr3 | 58141923 | 58141944 | +/− | 22 | GCCCTGGGTACAATTTTGGTTT | 1298 |
| chr3 | 58141924 | 58141945 | +/− | 22 | CCCTGGGTACAATTTTGGTTTT | 1299 |
| chr3 | 58141925 | 58141946 | +/− | 22 | CCTGGGTACAATTTTGGTTTTT | 1300 |
| chr3 | 58141926 | 58141947 | +/− | 22 | CTGGGTACAATTTTGGTTTTTT | 1301 |
| chr3 | 58141927 | 58141948 | +/− | 22 | TGGGTACAATTTTGGTTTTTTC | 1302 |
| chr3 | 58141928 | 58141949 | +/− | 22 | GGGTACAATTTTGGTTTTTTCC | 1303 |
| chr3 | 58141929 | 58141950 | +/− | 22 | GGTACAATTTTGGTTTTTTCCT | 1304 |
| chr3 | 58141930 | 58141951 | +/− | 22 | GTACAATTTTGGTTTTTTCCTT | 1305 |
| chr3 | 58141931 | 58141952 | +/− | 22 | TACAATTTTGGTTTTTTCCTTT | 1306 |
| chr3 | 58141932 | 58141953 | +/− | 22 | ACAATTTTGGTTTTTTCCTTTT | 1307 |
| chr3 | 58141933 | 58141954 | +/− | 22 | CAATTTTGGTTTTTTCCTTTTT | 1308 |
| chr3 | 58141934 | 58141955 | +/− | 22 | AATTTTGGTTTTTTCCTTTTTG | 1309 |
| chr3 | 58141935 | 58141956 | +/− | 22 | ATTTTGGTTTTTTCCTTTTTGT | 1310 |
| chr3 | 58141936 | 58141957 | +/− | 22 | TTTTGGTTTTTTCCTTTTTGTG | 1311 |
| chr3 | 58141937 | 58141958 | +/− | 22 | TTTGGTTTTTTCCTTTTTGTGT | 1312 |
| chr3 | 58141938 | 58141959 | +/− | 22 | TTGGTTTTTTCCTTTTTGTGTT | 1313 |
| chr3 | 58141939 | 58141960 | +/− | 22 | TGGTTTTTTCCTTTTTGTGTTT | 1314 |
| chr3 | 58141940 | 58141961 | +/− | 22 | GGTTTTTTCCTTTTTGTGTTTC | 1315 |
| chr3 | 58141941 | 58141962 | +/− | 22 | GTTTTTTCCTTTTTGTGTTTCT | 1316 |
| chr3 | 58141942 | 58141963 | +/− | 22 | TTTTTTCCTTTTTGTGTTTCTG | 1317 |
| chr3 | 58141943 | 58141964 | +/− | 22 | TTTTTCCTTTTTGTGTTTCTGT | 1318 |
| chr3 | 58141944 | 58141965 | +/− | 22 | TTTTCCTTTTTGTGTTTCTGTG | 1319 |
| chr3 | 58141945 | 58141966 | +/− | 22 | TTTCCTTTTTGTGTTTCTGTGT | 1320 |
| chr3 | 58141946 | 58141967 | +/− | 22 | TTCCTTTTTGTGTTTCTGTGTT | 1321 |
| chr3 | 58141947 | 58141968 | +/− | 22 | TCCTTTTTGTGTTTCTGTGTTT | 1322 |
| chr3 | 58141948 | 58141969 | +/− | 22 | CCTTTTTGTGTTTCTGTGTTTA | 1323 |
| chr3 | 58141949 | 58141970 | +/− | 22 | CTTTTTGTGTTTCTGTGTTTAC | 1324 |
| chr3 | 58141950 | 58141971 | +/− | 22 | TTTTTGTGTTTCTGTGTTTACT | 1325 |
| chr3 | 58141951 | 58141972 | +/− | 22 | TTTTGTGTTTCTGTGTTTACTC | 1326 |
| chr3 | 58141952 | 58141973 | +/− | 22 | TTTGTGTTTCTGTGTTTACTCA | 1327 |
| chr3 | 58141953 | 58141974 | +/− | 22 | TTGTGTTTCTGTGTTTACTCAG | 1328 |
| chr3 | 58141954 | 58141975 | +/− | 22 | TGTGTTTCTGTGTTTACTCAGC | 1329 |
| chr3 | 58141955 | 58141976 | +/− | 22 | GTGTTTCTGTGTTTACTCAGCC | 1330 |
| chr3 | 58141956 | 58141977 | +/− | 22 | TGTTTCTGTGTTTACTCAGCCT | 1331 |
| chr3 | 58141957 | 58141978 | +/− | 22 | GTTTCTGTGTTTACTCAGCCTT | 1332 |
| chr3 | 58141958 | 58141979 | +/− | 22 | TTTCTGTGTTTACTCAGCCTTC | 1333 |
| chr3 | 58141959 | 58141980 | +/− | 22 | TTCTGTGTTTACTCAGCCTTCA | 1334 |
| chr3 | 58141960 | 58141981 | +/− | 22 | TCTGTGTTTACTCAGCCTTCAT | 1335 |
| chr3 | 58141961 | 58141982 | +/− | 22 | CTGTGTTTACTCAGCCTTCATT | 1336 |
| chr3 | 58141962 | 58141983 | +/− | 22 | TGTGTTTACTCAGCCTTCATTT | 1337 |
| chr3 | 58141963 | 58141984 | +/− | 22 | GTGTTTACTCAGCCTTCATTTC | 1338 |
| chr3 | 58141964 | 58141985 | +/− | 22 | TGTTTACTCAGCCTTCATTTCA | 1339 |
| chr3 | 58141965 | 58141986 | +/− | 22 | GTTTACTCAGCCTTCATTTCAG | 1340 |
| chr3 | 58141966 | 58141987 | +/− | 22 | TTTACTCAGCCTTCATTTCAGA | 1341 |
| chr3 | 58141967 | 58141988 | +/− | 22 | TTACTCAGCCTTCATTTCAGAA | 1342 |
| chr3 | 58141968 | 58141989 | +/− | 22 | TACTCAGCCTTCATTTCAGAAA | 1343 |
| chr3 | 58141969 | 58141990 | +/− | 22 | ACTCAGCCTTCATTTCAGAAAA | 1344 |
| chr3 | 58141970 | 58141991 | +/− | 22 | CTCAGCCTTCATTTCAGAAAAT | 1345 |
| chr3 | 58141971 | 58141992 | +/− | 22 | TCAGCCTTCATTTCAGAAAATC | 1346 |
| chr3 | 58141972 | 58141993 | +/− | 22 | CAGCCTTCATTTCAGAAAATCT | 1347 |
| chr3 | 58141973 | 58141994 | +/− | 22 | AGCCTTCATTTCAGAAAATCTG | 1348 |
| chr3 | 58141974 | 58141995 | +/− | 22 | GCCTTCATTTCAGAAAATCTGC | 1349 |
| chr3 | 58141975 | 58141996 | +/− | 22 | CCTTCATTTCAGAAAATCTGCC | 1350 |
| chr3 | 58141976 | 58141997 | +/− | 22 | CTTCATTTCAGAAAATCTGCCA | 1351 |
| chr3 | 58141977 | 58141998 | +/− | 22 | TTCATTTCAGAAAATCTGCCAT | 1352 |
| chr3 | 58141978 | 58141999 | +/− | 22 | TCATTTCAGAAAATCTGCCATC | 1353 |
| chr3 | 58141979 | 58142000 | +/− | 22 | CATTTCAGAAAATCTGCCATCT | 1354 |
| chr3 | 58141980 | 58142001 | +/− | 22 | ATTTCAGAAAATCTGCCATCTG | 1355 |
| chr3 | 58141981 | 58142002 | +/− | 22 | TTTCAGAAAATCTGCCATCTGC | 1356 |
| chr3 | 58141982 | 58142003 | +/− | 22 | TTCAGAAAATCTGCCATCTGCT | 1357 |
| chr3 | 58141983 | 58142004 | +/− | 22 | TCAGAAAATCTGCCATCTGCTT | 1358 |
| chr3 | 58141984 | 58142005 | +/− | 22 | CAGAAAATCTGCCATCTGCTTC | 1359 |
| chr3 | 58141985 | 58142006 | +/− | 22 | AGAAAATCTGCCATCTGCTTCT | 1360 |
| chr3 | 58141986 | 58142007 | +/− | 22 | GAAAATCTGCCATCTGCTTCTG | 1361 |
| chr3 | 58141987 | 58142008 | +/− | 22 | AAAATCTGCCATCTGCTTCTGG | 1362 |
| chr3 | 58141988 | 58142009 | +/− | 22 | AAATCTGCCATCTGCTTCTGGG | 1363 |
| chr3 | 58141989 | 58142010 | +/− | 22 | AATCTGCCATCTGCTTCTGGGA | 1364 |
| chr3 | 58141990 | 58142011 | +/− | 22 | ATCTGCCATCTGCTTCTGGGAT | 1365 |
| chr3 | 58141991 | 58142012 | +/− | 22 | TCTGCCATCTGCTTCTGGGATT | 1366 |
| chr3 | 58141992 | 58142013 | +/− | 22 | CTGCCATCTGCTTCTGGGATTG | 1367 |
| chr3 | 58141993 | 58142014 | +/− | 22 | TGCCATCTGCTTCTGGGATTGC | 1368 |
| chr3 | 58141994 | 58142015 | +/− | 22 | GCCATCTGCTTCTGGGATTGCT | 1369 |
| chr3 | 58141995 | 58142016 | +/− | 22 | CCATCTGCTTCTGGGATTGCTT | 1370 |
| chr3 | 58141996 | 58142017 | +/− | 22 | CATCTGCTTCTGGGATTGCTTA | 1371 |
| chr3 | 58141997 | 58142018 | +/− | 22 | ATCTGCTTCTGGGATTGCTTAA | 1372 |
| chr3 | 58141998 | 58142019 | +/− | 22 | TCTGCTTCTGGGATTGCTTAAG | 1373 |
| chr3 | 58141999 | 58142020 | +/− | 22 | CTGCTTCTGGGATTGCTTAAGC | 1374 |
| chr3 | 58142000 | 58142021 | +/− | 22 | TGCTTCTGGGATTGCTTAAGCC | 1375 |
| chr3 | 58142001 | 58142022 | +/− | 22 | GCTTCTGGGATTGCTTAAGCCC | 1376 |
| chr3 | 58142002 | 58142023 | +/− | 22 | CTTCTGGGATTGCTTAAGCCCT | 1377 |
| chr3 | 58142003 | 58142024 | +/− | 22 | TTCTGGGATTGCTTAAGCCCTG | 1378 |
| chr3 | 58142004 | 58142025 | +/− | 22 | TCTGGGATTGCTTAAGCCCTGT | 1379 |
| chr3 | 58142005 | 58142026 | +/− | 22 | CTGGGATTGCTTAAGCCCTGTG | 1380 |
| chr3 | 58142006 | 58142027 | +/− | 22 | TGGGATTGCTTAAGCCCTGTGG | 1381 |
| chr3 | 58142007 | 58142028 | +/− | 22 | GGGATTGCTTAAGCCCTGTGGG | 1382 |
| chr3 | 58142008 | 58142029 | +/− | 22 | GGATTGCTTAAGCCCTGTGGGT | 1383 |
| chr3 | 58142009 | 58142030 | +/− | 22 | GATTGCTTAAGCCCTGTGGGTG | 1384 |
| chr3 | 58142010 | 58142031 | +/− | 22 | ATTGCTTAAGCCCTGTGGGTGT | 1385 |
| chr3 | 58142011 | 58142032 | +/− | 22 | TTGCTTAAGCCCTGTGGGTGTC | 1386 |
| chr3 | 58142012 | 58142033 | +/− | 22 | TGCTTAAGCCCTGTGGGTGTCC | 1387 |
| chr3 | 58142013 | 58142034 | +/− | 22 | GCTTAAGCCCTGTGGGTGTCCT | 1388 |
| chr3 | 58142014 | 58142035 | +/− | 22 | CTTAAGCCCTGTGGGTGTCCTG | 1389 |
| chr3 | 58142015 | 58142036 | +/− | 22 | TTAAGCCCTGTGGGTGTCCTGG | 1390 |
| chr3 | 58142016 | 58142037 | +/− | 22 | TAAGCCCTGTGGGTGTCCTGGT | 1391 |
| chr3 | 58142017 | 58142038 | +/− | 22 | AAGCCCTGTGGGTGTCCTGGTC | 1392 |
| chr3 | 58142018 | 58142039 | +/− | 22 | AGCCCTGTGGGTGTCCTGGTCA | 1393 |
| chr3 | 58142019 | 58142040 | +/− | 22 | GCCCTGTGGGTGTCCTGGTCAT | 1394 |
| chr3 | 58142020 | 58142041 | +/− | 22 | CCCTGTGGGTGTCCTGGTCATT | 1395 |
| chr3 | 58142021 | 58142042 | +/− | 22 | CCTGTGGGTGTCCTGGTCATTG | 1396 |
| chr3 | 58142022 | 58142043 | +/− | 22 | CTGTGGGTGTCCTGGTCATTGG | 1397 |
| chr3 | 58142023 | 58142044 | +/− | 22 | TGTGGGTGTCCTGGTCATTGGT | 1398 |

[0100] Tables 9-15 comprise some additional example oligonucleotide sequences of variable sequence lengths that may be used to induce an isoform switch or modulate (e.g., inhibit or enhance) the biological activity of a specific isoform of one or several of the genes described above or elsewhere herein (e.g., genes comprising one or more of NEDD4L (ENV2), MAP3K7 (ENV3), NFYA (ENV11), ESYT2 (ENV21), MARK2 (ENV18), ST7 (ENV19), ARVCF (ENV22), SYTL2 (ENV17), R3HDM1 (ENV23), COL4A3BP (ENV9), TANGO2 (ENV6), SEPT9 (ENV15), ROBO1 (ENV4), FAM122B (ENV5), CD47 (ENV13), LSR (ENV20), PBX1 (ENV16), EPB41 (ENV14), ADAM15 (ENV7), EPB41L1 (ENV8), ABI1 (ENV10), FLNB (ENV1), CTNND1 (ENV12), GPR160 (ENV24), ITGB3BP (ENV25), INCENP (ENV26), DENND1B (ENV27), CA12 (ENV28).

[0101] As discussed above, oligonucleotide sequences comprised in a table may be specific for a single target, or for more than one target. In some cases, oligonucleotide sequences comprised in more than one tables are specific for a single target. For example, oligonucleotide sequences comprised in Tables 9-15 may be specific for a single target. The target may be the same as or differ from the target which the oligonucleotide sequences comprised in Tables 2-8 are specific for. The target may be a gene selected from genes described above or elsewhere herein.

TABLE 9
16-mer target-specific

| | | | | | | SEQ |
|---|---|---|---|---|---|---|
| | | | | | | ID |
| CHR | START | END | STRAND | Kmer | SEQUENCE | NO: |
| chr18 | 58335318 | 58335333 | +/− | 16 | GGTCATCAGCGACTGC | 1399 |
| chr18 | 58335319 | 58335334 | +/− | 16 | GTCATCAGCGACTGCT | 1400 |
| chr18 | 58335320 | 58335335 | +/− | 16 | TCATCAGCGACTGCTG | 1401 |
| chr18 | 58335321 | 58335336 | +/− | 16 | CATCAGCGACTGCTGG | 1402 |
| chr18 | 58335322 | 58335337 | +/− | 16 | ATCAGCGACTGCTGGC | 1403 |
| chr18 | 58335323 | 58335338 | +/− | 16 | TCAGCGACTGCTGGCT | 1404 |
| chr18 | 58335324 | 58335339 | +/− | 16 | CAGCGACTGCTGGCTT | 1405 |
| chr18 | 58335325 | 58335340 | +/− | 16 | AGCGACTGCTGGCTTT | 1406 |
| chr18 | 58335326 | 58335341 | +/− | 16 | GCGACTGCTGGCTTTG | 1407 |
| chr18 | 58335327 | 58335342 | +/− | 16 | CGACTGCTGGCTTTGT | 1408 |
| chr18 | 58335328 | 58335343 | +/− | 16 | GACTGCTGGCTTTGTC | 1409 |
| chr18 | 58335329 | 58335344 | +/− | 16 | ACTGCTGGCTTTGTCT | 1410 |
| chr18 | 58335330 | 58335345 | +/− | 16 | CTGCTGGCTTTGTCTG | 1411 |
| chr18 | 58335331 | 58335346 | +/− | 16 | TGCTGGCTTTGTCTGG | 1412 |
| chr18 | 58335332 | 58335347 | +/− | 16 | GCTGGCTTTGTCTGGA | 1413 |
| chr18 | 58335333 | 58335348 | +/− | 16 | CTGGCTTTGTCTGGAT | 1414 |
| chr18 | 58335334 | 58335349 | +/− | 16 | TGGCTTTGTCTGGATA | 1415 |
| chr18 | 58335335 | 58335350 | +/− | 16 | GGCTTTGTCTGGATAG | 1416 |
| chr18 | 58335336 | 58335351 | +/− | 16 | GCTTTGTCTGGATAGG | 1417 |
| chr18 | 58335337 | 58335352 | +/− | 16 | CTTTGTCTGGATAGGG | 1418 |
| chr18 | 58335338 | 58335353 | +/− | 16 | TTTGTCTGGATAGGGT | 1419 |
| chr18 | 58335339 | 58335354 | +/− | 16 | TTGTCTGGATAGGGTG | 1420 |
| chr18 | 58335340 | 58335355 | +/− | 16 | TGTCTGGATAGGGTGG | 1421 |
| chr18 | 58335341 | 58335356 | +/− | 16 | GTCTGGATAGGGTGGG | 1422 |
| chr18 | 58335342 | 58335357 | +/− | 16 | TCTGGATAGGGTGGGT | 1423 |
| chr18 | 58335343 | 58335358 | +/− | 16 | CTGGATAGGGTGGGTT | 1424 |
| chr18 | 58335344 | 58335359 | +/− | 16 | TGGATAGGGTGGGTTT | 1425 |
| chr18 | 58335345 | 58335360 | +/− | 16 | GGATAGGGTGGGTTTC | 1426 |
| chr18 | 58335346 | 58335361 | +/− | 16 | GATAGGGTGGGTTTCA | 1427 |
| chr18 | 58335347 | 58335362 | +/− | 16 | ATAGGGTGGGTTTCAG | 1428 |
| chr18 | 58335348 | 58335363 | +/− | 16 | TAGGGTGGGTTTCAGG | 1429 |
| chr18 | 58335349 | 58335364 | +/− | 16 | AGGGTGGGTTTCAGGG | 1430 |
| chr18 | 58335350 | 58335365 | +/− | 16 | GGGTGGGTTTCAGGGA | 1431 |
| chr18 | 58335351 | 58335366 | +/− | 16 | GGTGGGTTTCAGGGAT | 1432 |
| chr18 | 58335352 | 58335367 | +/− | 16 | GTGGGTTTCAGGGATT | 1433 |
| chr18 | 58335353 | 58335368 | +/− | 16 | TGGGTTTCAGGGATTC | 1434 |
| chr18 | 58335354 | 58335369 | +/− | 16 | GGGTTTCAGGGATTCT | 1435 |
| chr18 | 58335355 | 58335370 | +/− | 16 | GGTTTCAGGGATTCTG | 1436 |
| chr18 | 58335356 | 58335371 | +/− | 16 | GTTTCAGGGATTCTGA | 1437 |
| chr18 | 58335357 | 58335372 | +/− | 16 | TTTCAGGGATTCTGAT | 1438 |
| chr18 | 58335358 | 58335373 | +/− | 16 | TTCAGGGATTCTGATC | 1439 |
| chr18 | 58335359 | 58335374 | +/− | 16 | TCAGGGATTCTGATCT | 1440 |
| chr18 | 58335360 | 58335375 | +/− | 16 | CAGGGATTCTGATCTC | 1441 |
| chr18 | 58335361 | 58335376 | +/− | 16 | AGGGATTCTGATCTCA | 1442 |
| chr18 | 58335362 | 58335377 | +/− | 16 | GGGATTCTGATCTCAC | 1443 |
| chr18 | 58335363 | 58335378 | +/− | 16 | GGATTCTGATCTCACG | 1444 |
| chr18 | 58335364 | 58335379 | +/− | 16 | GATTCTGATCTCACGT | 1445 |
| chr18 | 58335365 | 58335380 | +/− | 16 | ATTCTGATCTCACGTC | 1446 |
| chr18 | 58335366 | 58335381 | +/− | 16 | TTCTGATCTCACGTCA | 1447 |
| chr18 | 58335367 | 58335382 | +/− | 16 | TCTGATCTCACGTCAC | 1448 |
| chr18 | 58335368 | 58335383 | +/− | 16 | CTGATCTCACGTCACC | 1449 |
| chr18 | 58335369 | 58335384 | +/− | 16 | TGATCTCACGTCACCT | 1450 |
| chr18 | 58335370 | 58335385 | +/− | 16 | GATCTCACGTCACCTG | 1451 |
| chr18 | 58335371 | 58335386 | +/− | 16 | ATCTCACGTCACCTGC | 1452 |
| chr18 | 58335372 | 58335387 | +/− | 16 | TCTCACGTCACCTGCC | 1453 |
| chr18 | 58335373 | 58335388 | +/− | 16 | CTCACGTCACCTGCCT | 1454 |
| chr18 | 58335374 | 58335389 | +/− | 16 | TCACGTCACCTGCCTT | 1455 |
| chr18 | 58335375 | 58335390 | +/− | 16 | CACGTCACCTGCCTTA | 1456 |
| chr18 | 58335376 | 58335391 | +/− | 16 | ACGTCACCTGCCTTAC | 1457 |
| chr18 | 58335377 | 58335392 | +/− | 16 | CGTCACCTGCCTTACA | 1458 |
| chr18 | 58335378 | 58335393 | +/− | 16 | GTCACCTGCCTTACAG | 1459 |
| chr18 | 58335379 | 58335394 | +/− | 16 | TCACCTGCCTTACAGC | 1460 |
| chr18 | 58335380 | 58335395 | +/− | 16 | CACCTGCCTTACAGCG | 1461 |
| chr18 | 58335381 | 58335396 | +/− | 16 | ACCTGCCTTACAGCGC | 1462 |
| chr18 | 58335382 | 58335397 | +/− | 16 | CCTGCCTTACAGCGCT | 1463 |
| chr18 | 58335383 | 58335398 | +/− | 16 | CTGCCTTACAGCGCTG | 1464 |
| chr18 | 58335384 | 58335399 | +/− | 16 | TGCCTTACAGCGCTGC | 1465 |
| chr18 | 58335385 | 58335400 | +/− | 16 | GCCTTACAGCGCTGCC | 1466 |
| chr18 | 58335386 | 58335401 | +/− | 16 | CCTTACAGCGCTGCCA | 1467 |
| chr18 | 58335387 | 58335402 | +/− | 16 | CTTACAGCGCTGCCAC | 1468 |
| chr18 | 58335388 | 58335403 | +/− | 16 | TTACAGCGCTGCCACA | 1469 |
| chr18 | 58335389 | 58335404 | +/− | 16 | TACAGCGCTGCCACAG | 1470 |
| chr18 | 58335390 | 58335405 | +/− | 16 | ACAGCGCTGCCACAGC | 1471 |
| chr18 | 58335391 | 58335406 | +/− | 16 | CAGCGCTGCCACAGCA | 1472 |
| chr18 | 58335392 | 58335407 | +/− | 16 | AGCGCTGCCACAGCAG | 1473 |
| chr18 | 58335393 | 58335408 | +/− | 16 | GCGCTGCCACAGCAGT | 1474 |
| chr18 | 58335394 | 58335409 | +/− | 16 | CGCTGCCACAGCAGTG | 1475 |
| chr18 | 58335395 | 58335410 | +/− | 16 | GCTGCCACAGCAGTGG | 1476 |
| chr18 | 58335396 | 58335411 | +/− | 16 | CTGCCACAGCAGTGGG | 1477 |
| chr18 | 58335397 | 58335412 | +/− | 16 | TGCCACAGCAGTGGGC | 1478 |
| chr18 | 58335398 | 58335413 | +/− | 16 | GCCACAGCAGTGGGCC | 1479 |
| chr18 | 58335399 | 58335414 | +/− | 16 | CCACAGCAGTGGGCCC | 1480 |
| chr18 | 58335400 | 58335415 | +/− | 16 | CACAGCAGTGGGCCCT | 1481 |
| chr18 | 58335401 | 58335416 | +/− | 16 | ACAGCAGTGGGCCCTG | 1482 |
| chr18 | 58335402 | 58335417 | +/− | 16 | CAGCAGTGGGCCCTGA | 1483 |
| chr18 | 58335403 | 58335418 | +/− | 16 | AGCAGTGGGCCCTGAT | 1484 |
| chr18 | 58335404 | 58335419 | +/− | 16 | GCAGTGGGCCCTGATT | 1485 |
| chr18 | 58335405 | 58335420 | +/− | 16 | CAGTGGGCCCTGATTC | 1486 |
| chr18 | 58335406 | 58335421 | +/− | 16 | AGTGGGCCCTGATTCA | 1487 |
| chr18 | 58335407 | 58335422 | +/− | 16 | GTGGGCCCTGATTCAG | 1488 |
| chr18 | 58335408 | 58335423 | +/− | 16 | TGGGCCCTGATTCAGA | 1489 |
| chr18 | 58335409 | 58335424 | +/− | 16 | GGGCCCTGATTCAGAC | 1490 |
| chr18 | 58335410 | 58335425 | +/− | 16 | GGCCCTGATTCAGACA | 1491 |
| chr18 | 58335411 | 58335426 | +/− | 16 | GCCCTGATTCAGACAG | 1492 |
| chr18 | 58335412 | 58335427 | +/− | 16 | CCCTGATTCAGACAGC | 1493 |
| chr18 | 58335413 | 58335428 | +/− | 16 | CCTGATTCAGACAGCA | 1494 |
| chr18 | 58335414 | 58335429 | +/− | 16 | CTGATTCAGACAGCAG | 1495 |
| chr18 | 58335415 | 58335430 | +/− | 16 | TGATTCAGACAGCAGG | 1496 |
| chr18 | 58335317 | 58335332 | +/− | 16 | TGGTCATCAGCGACTG | 1497 |
| chr18 | 58335416 | 58335431 | +/− | 16 | GATTCAGACAGCAGGG | 1498 |
| chr18 | 58335417 | 58335432 | +/− | 16 | ATTCAGACAGCAGGGG | 1499 |
| chr18 | 58335418 | 58335433 | +/− | 16 | TTCAGACAGCAGGGGG | 1500 |
| chr18 | 58335419 | 58335434 | +/− | 16 | TCAGACAGCAGGGGGT | 1501 |
| chr18 | 58335420 | 58335435 | +/− | 16 | CAGACAGCAGGGGGTC | 1502 |
| chr18 | 58335421 | 58335436 | +/− | 16 | AGACAGCAGGGGGTCA | 1503 |
| chr18 | 58335422 | 58335437 | +/− | 16 | GACAGCAGGGGGTCAT | 1504 |
| chr18 | 58335423 | 58335438 | +/− | 16 | ACAGCAGGGGGTCATC | 1505 |
| chr18 | 58335424 | 58335439 | +/− | 16 | CAGCAGGGGGTCATCC | 1506 |
| chr18 | 58335425 | 58335440 | +/− | 16 | AGCAGGGGGTCATCCC | 1507 |
| chr18 | 58335426 | 58335441 | +/− | 16 | GCAGGGGGTCATCCCC | 1508 |
| chr18 | 58335427 | 58335442 | +/− | 16 | CAGGGGGTCATCCCCT | 1509 |
| chr18 | 58335428 | 58335443 | +/− | 16 | AGGGGGTCATCCCCTA | 1510 |
| chr18 | 58335429 | 58335444 | +/− | 16 | GGGGGTCATCCCCTAA | 1511 |
| chr18 | 58335430 | 58335445 | +/− | 16 | GGGGTCATCCCCTAAG | 1512 |
| chr18 | 58335431 | 58335446 | +/− | 16 | GGGTCATCCCCTAAGT | 1513 |
| chr18 | 58335432 | 58335447 | +/− | 16 | GGTCATCCCCTAAGTG | 1514 |

TABLE 10
17-mer target-specific ASOs

| | | | | | | SEQ |
|---|---|---|---|---|---|---|
| | | | | | | ID |
| CHR | START | END | STRAND | Kmer | SEQUENCE | NO: |
| chr18 | 58335318 | 58335334 | +/− | 17 | GGTCATCAGCGACTGCT | 1515 |
| chr18 | 58335319 | 58335335 | +/− | 17 | GTCATCAGCGACTGCTG | 1516 |
| chr18 | 58335320 | 58335336 | +/− | 17 | TCATCAGCGACTGCTGG | 1517 |
| chr18 | 58335321 | 58335337 | +/− | 17 | CATCAGCGACTGCTGGC | 1518 |
| chr18 | 58335322 | 58335338 | +/− | 17 | ATCAGCGACTGCTGGCT | 1519 |
| chr18 | 58335323 | 58335339 | +/− | 17 | TCAGCGACTGCTGGCTT | 1520 |
| chr18 | 58335324 | 58335340 | +/− | 17 | CAGCGACTGCTGGCTTT | 1521 |
| chr18 | 58335325 | 58335341 | +/− | 17 | AGCGACTGCTGGCTTTG | 1522 |
| chr18 | 58335326 | 58335342 | +/− | 17 | GCGACTGCTGGCTTTGT | 1523 |
| chr18 | 58335327 | 58335343 | +/− | 17 | CGACTGCTGGCTTTGTC | 1524 |
| chr18 | 58335328 | 58335344 | +/− | 17 | GACTGCTGGCTTTGTCT | 1525 |
| chr18 | 58335329 | 58335345 | +/− | 17 | ACTGCTGGCTTTGTCTG | 1526 |
| chr18 | 58335330 | 58335346 | +/− | 17 | CTGCTGGCTTTGTCTGG | 1527 |
| chr18 | 58335331 | 58335347 | +/− | 17 | TGCTGGCTTTGTCTGGA | 1528 |
| chr18 | 58335332 | 58335348 | +/− | 17 | GCTGGCTTTGTCTGGAT | 1529 |
| chr18 | 58335333 | 58335349 | +/− | 17 | CTGGCTTTGTCTGGATA | 1530 |
| chr18 | 58335334 | 58335350 | +/− | 17 | TGGCTTTGTCTGGATAG | 1531 |
| chr18 | 58335335 | 58335351 | +/− | 17 | GGCTTTGTCTGGATAGG | 1532 |
| chr18 | 58335336 | 58335352 | +/− | 17 | GCTTTGTCTGGATAGGG | 1533 |
| chr18 | 58335337 | 58335353 | +/− | 17 | CTTTGTCTGGATAGGGT | 1534 |
| chr18 | 58335338 | 58335354 | +/− | 17 | TTTGTCTGGATAGGGTG | 1535 |
| chr18 | 58335339 | 58335355 | +/− | 17 | TTGTCTGGATAGGGTGG | 1536 |
| chr18 | 58335340 | 58335356 | +/− | 17 | TGTCTGGATAGGGTGGG | 1537 |
| chr18 | 58335341 | 58335357 | +/− | 17 | GTCTGGATAGGGTGGGT | 1538 |
| chr18 | 58335342 | 58335358 | +/− | 17 | TCTGGATAGGGTGGGTT | 1539 |
| chr18 | 58335343 | 58335359 | +/− | 17 | CTGGATAGGGTGGGTTT | 1540 |
| chr18 | 58335344 | 58335360 | +/− | 17 | TGGATAGGGTGGGTTTC | 1541 |
| chr18 | 58335345 | 58335361 | +/− | 17 | GGATAGGGTGGGTTTCA | 1542 |
| chr18 | 58335346 | 58335362 | +/− | 17 | GATAGGGTGGGTTTCAG | 1543 |
| chr18 | 58335347 | 58335363 | +/− | 17 | ATAGGGTGGGTTTCAGG | 1544 |
| chr18 | 58335348 | 58335364 | +/− | 17 | TAGGGTGGGTTTCAGGG | 1545 |
| chr18 | 58335349 | 58335365 | +/− | 17 | AGGGTGGGTTTCAGGGA | 1546 |
| chr18 | 58335350 | 58335366 | +/− | 17 | GGGTGGGTTTCAGGGAT | 1547 |
| chr18 | 58335351 | 58335367 | +/− | 17 | GGTGGGTTTCAGGGATT | 1548 |
| chr18 | 58335352 | 58335368 | +/− | 17 | GTGGGTTTCAGGGATTC | 1549 |
| chr18 | 58335353 | 58335369 | +/− | 17 | TGGGTTTCAGGGATTCT | 1550 |
| chr18 | 58335354 | 58335370 | +/− | 17 | GGGTTTCAGGGATTCTG | 1551 |
| chr18 | 58335355 | 58335371 | +/− | 17 | GGTTTCAGGGATTCTGA | 1552 |
| chr18 | 58335356 | 58335372 | +/− | 17 | GTTTCAGGGATTCTGAT | 1553 |
| chr18 | 58335357 | 58335373 | +/− | 17 | TTTCAGGGATTCTGATC | 1554 |
| chr18 | 58335358 | 58335374 | +/− | 17 | TTCAGGGATTCTGATCT | 1555 |
| chr18 | 58335359 | 58335375 | +/− | 17 | TCAGGGATTCTGATCTC | 1556 |
| chr18 | 58335360 | 58335376 | +/− | 17 | CAGGGATTCTGATCTCA | 1557 |
| chr18 | 58335361 | 58335377 | +/− | 17 | AGGGATTCTGATCTCAC | 1558 |
| chr18 | 58335362 | 58335378 | +/− | 17 | GGGATTCTGATCTCACG | 1559 |
| chr18 | 58335363 | 58335379 | +/− | 17 | GGATTCTGATCTCACGT | 1560 |
| chr18 | 58335364 | 58335380 | +/− | 17 | GATTCTGATCTCACGTC | 1561 |
| chr18 | 58335365 | 58335381 | +/− | 17 | ATTCTGATCTCACGTCA | 1562 |
| chr18 | 58335366 | 58335382 | +/− | 17 | TTCTGATCTCACGTCAC | 1563 |
| chr18 | 58335367 | 58335383 | +/− | 17 | TCTGATCTCACGTCACC | 1564 |
| chr18 | 58335368 | 58335384 | +/− | 17 | CTGATCTCACGTCACCT | 1565 |
| chr18 | 58335369 | 58335385 | +/− | 17 | TGATCTCACGTCACCTG | 1566 |
| chr18 | 58335370 | 58335386 | +/− | 17 | GATCTCACGTCACCTGC | 1567 |
| chr18 | 58335371 | 58335387 | +/− | 17 | ATCTCACGTCACCTGCC | 1568 |
| chr18 | 58335372 | 58335388 | +/− | 17 | TCTCACGTCACCTGCCT | 1569 |
| chr18 | 58335373 | 58335389 | +/− | 17 | CTCACGTCACCTGCCTT | 1570 |
| chr18 | 58335374 | 58335390 | +/− | 17 | TCACGTCACCTGCCTTA | 1571 |
| chr18 | 58335375 | 58335391 | +/− | 17 | CACGTCACCTGCCTTAC | 1572 |
| chr18 | 58335376 | 58335392 | +/− | 17 | ACGTCACCTGCCTTACA | 1573 |
| chr18 | 58335377 | 58335393 | +/− | 17 | CGTCACCTGCCTTACAG | 1574 |
| chr18 | 58335378 | 58335394 | +/− | 17 | GTCACCTGCCTTACAGC | 1575 |
| chr18 | 58335379 | 58335395 | +/− | 17 | TCACCTGCCTTACAGCG | 1576 |
| chr18 | 58335380 | 58335396 | +/− | 17 | CACCTGCCTTACAGCGC | 1577 |
| chr18 | 58335381 | 58335397 | +/− | 17 | ACCTGCCTTACAGCGCT | 1578 |
| chr18 | 58335382 | 58335398 | +/− | 17 | CCTGCCTTACAGCGCTG | 1579 |
| chr18 | 58335383 | 58335399 | +/− | 17 | CTGCCTTACAGCGCTGC | 1580 |
| chr18 | 58335384 | 58335400 | +/− | 17 | TGCCTTACAGCGCTGCC | 1581 |
| chr18 | 58335385 | 58335401 | +/− | 17 | GCCTTACAGCGCTGCCA | 1582 |
| chr18 | 58335386 | 58335402 | +/− | 17 | CCTTACAGCGCTGCCAC | 1583 |
| chr18 | 58335387 | 58335403 | +/− | 17 | CTTACAGCGCTGCCACA | 1584 |
| chr18 | 58335388 | 58335404 | +/− | 17 | TTACAGCGCTGCCACAG | 1585 |
| chr18 | 58335389 | 58335405 | +/− | 17 | TACAGCGCTGCCACAGC | 1586 |
| chr18 | 58335390 | 58335406 | +/− | 17 | ACAGCGCTGCCACAGCA | 1587 |
| chr18 | 58335391 | 58335407 | +/− | 17 | CAGCGCTGCCACAGCAG | 1588 |
| chr18 | 58335392 | 58335408 | +/− | 17 | AGCGCTGCCACAGCAGT | 1589 |
| chr18 | 58335393 | 58335409 | +/− | 17 | GCGCTGCCACAGCAGTG | 1590 |
| chr18 | 58335394 | 58335410 | +/− | 17 | CGCTGCCACAGCAGTGG | 1591 |
| chr18 | 58335395 | 58335411 | +/− | 17 | GCTGCCACAGCAGTGGG | 1592 |
| chr18 | 58335396 | 58335412 | +/− | 17 | CTGCCACAGCAGTGGGC | 1593 |
| chr18 | 58335397 | 58335413 | +/− | 17 | TGCCACAGCAGTGGGCC | 1594 |
| chr18 | 58335398 | 58335414 | +/− | 17 | GCCACAGCAGTGGGCCC | 1595 |
| chr18 | 58335399 | 58335415 | +/− | 17 | CCACAGCAGTGGGCCCT | 1596 |
| chr18 | 58335400 | 58335416 | +/− | 17 | CACAGCAGTGGGCCCTG | 1597 |
| chr18 | 58335401 | 58335417 | +/− | 17 | ACAGCAGTGGGCCCTGA | 1598 |
| chr18 | 58335402 | 58335418 | +/− | 17 | CAGCAGTGGGCCCTGAT | 1599 |
| chr18 | 58335403 | 58335419 | +/− | 17 | AGCAGTGGGCCCTGATT | 1600 |
| chr18 | 58335404 | 58335420 | +/− | 17 | GCAGTGGGCCCTGATTC | 1601 |
| chr18 | 58335405 | 58335421 | +/− | 17 | CAGTGGGCCCTGATTCA | 1602 |
| chr18 | 58335406 | 58335422 | +/− | 17 | AGTGGGCCCTGATTCAG | 1603 |
| chr18 | 58335407 | 58335423 | +/− | 17 | GTGGGCCCTGATTCAGA | 1604 |
| chr18 | 58335408 | 58335424 | +/− | 17 | TGGGCCCTGATTCAGAC | 1605 |
| chr18 | 58335409 | 58335425 | +/− | 17 | GGGCCCTGATTCAGACA | 1606 |
| chr18 | 58335410 | 58335426 | +/− | 17 | GGCCCTGATTCAGACAG | 1607 |
| chr18 | 58335411 | 58335427 | +/− | 17 | GCCCTGATTCAGACAGC | 1608 |
| chr18 | 58335412 | 58335428 | +/− | 17 | CCCTGATTCAGACAGCA | 1609 |
| chr18 | 58335413 | 58335429 | +/− | 17 | CCTGATTCAGACAGCAG | 1610 |
| chr18 | 58335414 | 58335430 | +/− | 17 | CTGATTCAGACAGCAGG | 1611 |
| chr18 | 58335317 | 58335333 | +/− | 17 | TGGTCATCAGCGACTGC | 1612 |
| chr18 | 58335415 | 58335431 | +/− | 17 | TGATTCAGACAGCAGGG | 1613 |
| chr18 | 58335416 | 58335432 | +/− | 17 | GATTCAGACAGCAGGGG | 1614 |
| chr18 | 58335417 | 58335433 | +/− | 17 | ATTCAGACAGCAGGGGG | 1615 |
| chr18 | 58335418 | 58335434 | +/− | 17 | TTCAGACAGCAGGGGGT | 1616 |
| chr18 | 58335419 | 58335435 | +/− | 17 | TCAGACAGCAGGGGGTC | 1617 |
| chr18 | 58335420 | 58335436 | +/− | 17 | CAGACAGCAGGGGGTCA | 1618 |
| chr18 | 58335421 | 58335437 | +/− | 17 | AGACAGCAGGGGGTCAT | 1619 |
| chr18 | 58335422 | 58335438 | +/− | 17 | GACAGCAGGGGGTCATC | 1620 |
| chr18 | 58335423 | 58335439 | +/− | 17 | ACAGCAGGGGGTCATCC | 1621 |
| chr18 | 58335424 | 58335440 | +/− | 17 | CAGCAGGGGGTCATCCC | 1622 |
| chr18 | 58335425 | 58335441 | +/− | 17 | AGCAGGGGGTCATCCCC | 1623 |
| chr18 | 58335426 | 58335442 | +/− | 17 | GCAGGGGGTCATCCCCT | 1624 |
| chr18 | 58335427 | 58335443 | +/− | 17 | CAGGGGGTCATCCCCTA | 1625 |
| chr18 | 58335428 | 58335444 | +/− | 17 | AGGGGGTCATCCCCTAA | 1626 |
| chr18 | 58335429 | 58335445 | +/− | 17 | GGGGGTCATCCCCTAAG | 1627 |
| chr18 | 58335430 | 58335446 | +/− | 17 | GGGGTCATCCCCTAAGT | 1628 |
| chr18 | 58335431 | 58335447 | +/− | 17 | GGGTCATCCCCTAAGTG | 1629 |

TABLE 11
18-mer target-specific ASOs

| | | | | | | SEQ |
|---|---|---|---|---|---|---|
| | | | | | | ID |
| CHR | START | END | STRAND | Kmer | SEQUENCE | NO: |
| chr18 | 58335318 | 58335335 | +/− | 18 | GGTCATCAGCGACTGCTG | 1630 |
| chr18 | 58335319 | 58335336 | +/− | 18 | GTCATCAGCGACTGCTGG | 1631 |
| chr18 | 58335320 | 58335337 | +/− | 18 | TCATCAGCGACTGCTGGC | 1632 |
| chr18 | 58335321 | 58335338 | +/− | 18 | CATCAGCGACTGCTGGCT | 1633 |
| chr18 | 58335322 | 58335339 | +/− | 18 | ATCAGCGACTGCTGGCTT | 1634 |
| chr18 | 58335323 | 58335340 | +/− | 18 | TCAGCGACTGCTGGCTTT | 1635 |
| chr18 | 58335324 | 58335341 | +/− | 18 | CAGCGACTGCTGGCTTTG | 1636 |
| chr18 | 58335325 | 58335342 | +/− | 18 | AGCGACTGCTGGCTTTGT | 1637 |
| chr18 | 58335326 | 58335343 | +/− | 18 | GCGACTGCTGGCTTTGTC | 1638 |
| chr18 | 58335327 | 58335344 | +/− | 18 | CGACTGCTGGCTTTGTCT | 1639 |
| chr18 | 58335328 | 58335345 | +/− | 18 | GACTGCTGGCTTTGTCTG | 1640 |
| chr18 | 58335329 | 58335346 | +/− | 18 | ACTGCTGGCTTTGTCTGG | 1641 |
| chr18 | 58335330 | 58335347 | +/− | 18 | CTGCTGGCTTTGTCTGGA | 1642 |
| chr18 | 58335331 | 58335348 | +/− | 18 | TGCTGGCTTTGTCTGGAT | 1643 |
| chr18 | 58335332 | 58335349 | +/− | 18 | GCTGGCTTTGTCTGGATA | 1644 |
| chr18 | 58335333 | 58335350 | +/− | 18 | CTGGCTTTGTCTGGATAG | 1645 |
| chr18 | 58335334 | 58335351 | +/− | 18 | TGGCTTTGTCTGGATAGG | 1646 |
| chr18 | 58335335 | 58335352 | +/− | 18 | GGCTTTGTCTGGATAGGG | 1647 |
| chr18 | 58335336 | 58335353 | +/− | 18 | GCTTTGTCTGGATAGGGT | 1648 |
| chr18 | 58335337 | 58335354 | +/− | 18 | CTTTGTCTGGATAGGGTG | 1649 |
| chr18 | 58335338 | 58335355 | +/− | 18 | TTTGTCTGGATAGGGTGG | 1650 |
| chr18 | 58335339 | 58335356 | +/− | 18 | TTGTCTGGATAGGGTGGG | 1651 |
| chr18 | 58335340 | 58335357 | +/− | 18 | TGTCTGGATAGGGTGGGT | 1652 |
| chr18 | 58335341 | 58335358 | +/− | 18 | GTCTGGATAGGGTGGGTT | 1653 |
| chr18 | 58335342 | 58335359 | +/− | 18 | TCTGGATAGGGTGGGTTT | 1654 |
| chr18 | 58335343 | 58335360 | +/− | 18 | CTGGATAGGGTGGGTTTC | 1655 |
| chr18 | 58335344 | 58335361 | +/− | 18 | TGGATAGGGTGGGTTTCA | 1656 |
| chr18 | 58335345 | 58335362 | +/− | 18 | GGATAGGGTGGGTTTCAG | 1657 |
| chr18 | 58335346 | 58335363 | +/− | 18 | GATAGGGTGGGTTTCAGG | 1658 |
| chr18 | 58335347 | 58335364 | +/− | 18 | ATAGGGTGGGTTTCAGGG | 1659 |
| chr18 | 58335348 | 58335365 | +/− | 18 | TAGGGTGGGTTTCAGGGA | 1660 |
| chr18 | 58335349 | 58335366 | +/− | 18 | AGGGTGGGTTTCAGGGAT | 1661 |
| chr18 | 58335350 | 58335367 | +/− | 18 | GGGTGGGTTTCAGGGATT | 1662 |
| chr18 | 58335351 | 58335368 | +/− | 18 | GGTGGGTTTCAGGGATTC | 1663 |
| chr18 | 58335352 | 58335369 | +/− | 18 | GTGGGTTTCAGGGATTCT | 1664 |
| chr18 | 58335353 | 58335370 | +/− | 18 | TGGGTTTCAGGGATTCTG | 1665 |
| chr18 | 58335354 | 58335371 | +/− | 18 | GGGTTTCAGGGATTCTGA | 1666 |
| chr18 | 58335355 | 58335372 | +/− | 18 | GGTTTCAGGGATTCTGAT | 1667 |
| chr18 | 58335356 | 58335373 | +/− | 18 | GTTTCAGGGATTCTGATC | 1668 |
| chr18 | 58335357 | 58335374 | +/− | 18 | TTTCAGGGATTCTGATCT | 1669 |
| chr18 | 58335358 | 58335375 | +/− | 18 | TTCAGGGATTCTGATCTC | 1670 |
| chr18 | 58335359 | 58335376 | +/− | 18 | TCAGGGATTCTGATCTCA | 1671 |
| chr18 | 58335360 | 58335377 | +/− | 18 | CAGGGATTCTGATCTCAC | 1672 |
| chr18 | 58335361 | 58335378 | +/− | 18 | AGGGATTCTGATCTCACG | 1673 |
| chr18 | 58335362 | 58335379 | +/− | 18 | GGGATTCTGATCTCACGT | 1674 |
| chr18 | 58335363 | 58335380 | +/− | 18 | GGATTCTGATCTCACGTC | 1675 |
| chr18 | 58335364 | 58335381 | +/− | 18 | GATTCTGATCTCACGTCA | 1676 |
| chr18 | 58335365 | 58335382 | +/− | 18 | ATTCTGATCTCACGTCAC | 1677 |
| chr18 | 58335366 | 58335383 | +/− | 18 | TTCTGATCTCACGTCACC | 1678 |
| chr18 | 58335367 | 58335384 | +/− | 18 | TCTGATCTCACGTCACCT | 1679 |
| chr18 | 58335368 | 58335385 | +/− | 18 | CTGATCTCACGTCACCTG | 1680 |
| chr18 | 58335369 | 58335386 | +/− | 18 | TGATCTCACGTCACCTGC | 1681 |
| chr18 | 58335370 | 58335387 | +/− | 18 | GATCTCACGTCACCTGCC | 1682 |
| chr18 | 58335371 | 58335388 | +/− | 18 | ATCTCACGTCACCTGCCT | 1683 |
| chr18 | 58335372 | 58335389 | +/− | 18 | TCTCACGTCACCTGCCTT | 1684 |
| chr18 | 58335373 | 58335390 | +/− | 18 | CTCACGTCACCTGCCTTA | 1685 |
| chr18 | 58335374 | 58335391 | +/− | 18 | TCACGTCACCTGCCTTAC | 1686 |
| chr18 | 58335375 | 58335392 | +/− | 18 | CACGTCACCTGCCTTACA | 1687 |
| chr18 | 58335376 | 58335393 | +/− | 18 | ACGTCACCTGCCTTACAG | 1688 |
| chr18 | 58335377 | 58335394 | +/− | 18 | CGTCACCTGCCTTACAGC | 1689 |
| chr18 | 58335378 | 58335395 | +/− | 18 | GTCACCTGCCTTACAGCG | 1690 |
| chr18 | 58335379 | 58335396 | +/− | 18 | TCACCTGCCTTACAGCGC | 1691 |
| chr18 | 58335380 | 58335397 | +/− | 18 | CACCTGCCTTACAGCGCT | 1692 |
| chr18 | 58335381 | 58335398 | +/− | 18 | ACCTGCCTTACAGCGCTG | 1693 |
| chr18 | 58335382 | 58335399 | +/− | 18 | CCTGCCTTACAGCGCTGC | 1694 |
| chr18 | 58335383 | 58335400 | +/− | 18 | CTGCCTTACAGCGCTGCC | 1695 |
| chr18 | 58335384 | 58335401 | +/− | 18 | TGCCTTACAGCGCTGCCA | 1696 |
| chr18 | 58335385 | 58335402 | +/− | 18 | GCCTTACAGCGCTGCCAC | 1697 |
| chr18 | 58335386 | 58335403 | +/− | 18 | CCTTACAGCGCTGCCACA | 1698 |
| chr18 | 58335387 | 58335404 | +/− | 18 | CTTACAGCGCTGCCACAG | 1699 |
| chr18 | 58335388 | 58335405 | +/− | 18 | TTACAGCGCTGCCACAGC | 1700 |
| chr18 | 58335389 | 58335406 | +/− | 18 | TACAGCGCTGCCACAGCA | 1701 |
| chr18 | 58335390 | 58335407 | +/− | 18 | ACAGCGCTGCCACAGCAG | 1702 |
| chr18 | 58335391 | 58335408 | +/− | 18 | CAGCGCTGCCACAGCAGT | 1703 |
| chr18 | 58335392 | 58335409 | +/− | 18 | AGCGCTGCCACAGCAGTG | 1704 |
| chr18 | 58335393 | 58335410 | +/− | 18 | GCGCTGCCACAGCAGTGG | 1705 |
| chr18 | 58335394 | 58335411 | +/− | 18 | CGCTGCCACAGCAGTGGG | 1706 |
| chr18 | 58335395 | 58335412 | +/− | 18 | GCTGCCACAGCAGTGGGC | 1707 |
| chr18 | 58335396 | 58335413 | +/− | 18 | CTGCCACAGCAGTGGGCC | 1708 |
| chr18 | 58335397 | 58335414 | +/− | 18 | TGCCACAGCAGTGGGCCC | 1709 |
| chr18 | 58335398 | 58335415 | +/− | 18 | GCCACAGCAGTGGGCCCT | 1710 |
| chr18 | 58335399 | 58335416 | +/− | 18 | CCACAGCAGTGGGCCCTG | 1711 |
| chr18 | 58335400 | 58335417 | +/− | 18 | CACAGCAGTGGGCCCTGA | 1712 |
| chr18 | 58335401 | 58335418 | +/− | 18 | ACAGCAGTGGGCCCTGAT | 1713 |
| chr18 | 58335402 | 58335419 | +/− | 18 | CAGCAGTGGGCCCTGATT | 1714 |
| chr18 | 58335403 | 58335420 | +/− | 18 | AGCAGTGGGCCCTGATTC | 1715 |
| chr18 | 58335404 | 58335421 | +/− | 18 | GCAGTGGGCCCTGATTCA | 1716 |
| chr18 | 58335405 | 58335422 | +/− | 18 | CAGTGGGCCCTGATTCAG | 1717 |
| chr18 | 58335406 | 58335423 | +/− | 18 | AGTGGGCCCTGATTCAGA | 1718 |
| chr18 | 58335407 | 58335424 | +/− | 18 | GTGGGCCCTGATTCAGAC | 1719 |
| chr18 | 58335408 | 58335425 | +/− | 18 | TGGGCCCTGATTCAGACA | 1720 |
| chr18 | 58335409 | 58335426 | +/− | 18 | GGGCCCTGATTCAGACAG | 1721 |
| chr18 | 58335410 | 58335427 | +/− | 18 | GGCCCTGATTCAGACAGC | 1722 |
| chr18 | 58335411 | 58335428 | +/− | 18 | GCCCTGATTCAGACAGCA | 1723 |
| chr18 | 58335412 | 58335429 | +/− | 18 | CCCTGATTCAGACAGCAG | 1724 |
| chr18 | 58335413 | 58335430 | +/− | 18 | CCTGATTCAGACAGCAGG | 1725 |
| chr18 | 58335317 | 58335334 | +/− | 18 | TGGTCATCAGCGACTGCT | 1726 |
| chr18 | 58335414 | 58335431 | +/− | 18 | CTGATTCAGACAGCAGGG | 1727 |
| chr18 | 58335415 | 58335432 | +/− | 18 | TGATTCAGACAGCAGGGG | 1728 |
| chr18 | 58335416 | 58335433 | +/− | 18 | GATTCAGACAGCAGGGGG | 1729 |
| chr18 | 58335417 | 58335434 | +/− | 18 | ATTCAGACAGCAGGGGGT | 1730 |
| chr18 | 58335418 | 58335435 | +/− | 18 | TTCAGACAGCAGGGGGTC | 1731 |
| chr18 | 58335419 | 58335436 | +/− | 18 | TCAGACAGCAGGGGGTCA | 1732 |
| chr18 | 58335420 | 58335437 | +/− | 18 | CAGACAGCAGGGGGTCAT | 1733 |
| chr18 | 58335421 | 58335438 | +/− | 18 | AGACAGCAGGGGGTCATC | 1734 |
| chr18 | 58335422 | 58335439 | +/− | 18 | GACAGCAGGGGGTCATCC | 1735 |
| chr18 | 58335423 | 58335440 | +/− | 18 | ACAGCAGGGGGTCATCCC | 1736 |
| chr18 | 58335424 | 58335441 | +/− | 18 | CAGCAGGGGGTCATCCCC | 1737 |
| chr18 | 58335425 | 58335442 | +/− | 18 | AGCAGGGGGTCATCCCCT | 1738 |
| chr18 | 58335426 | 58335443 | +/− | 18 | GCAGGGGGTCATCCCCTA | 1739 |
| chr18 | 58335427 | 58335444 | +/− | 18 | CAGGGGGTCATCCCCTAA | 1740 |
| chr18 | 58335428 | 58335445 | +/− | 18 | AGGGGGTCATCCCCTAAG | 1741 |
| chr18 | 58335429 | 58335446 | +/− | 18 | GGGGGTCATCCCCTAAGT | 1742 |
| chr18 | 58335430 | 58335447 | +/− | 18 | GGGGTCATCCCCTAAGTG | 1743 |

TABLE 12
19-mer target-specific ASOs

| | | | | | | SEQ |
|---|---|---|---|---|---|---|
| | | | | | | ID |
| CHR | START | END | STRAND | Kmer | SEQUENCE | NO: |
| chr18 | 58335318 | 58335336 | +/− | 19 | GGTCATCAGCGACTGCTGG | 1744 |
| chr18 | 58335319 | 58335337 | +/− | 19 | GTCATCAGCGACTGCTGGC | 1745 |
| chr18 | 58335320 | 58335338 | +/− | 19 | TCATCAGCGACTGCTGGCT | 1746 |
| chr18 | 58335321 | 58335339 | +/− | 19 | CATCAGCGACTGCTGGCTT | 1747 |
| chr18 | 58335322 | 58335340 | +/− | 19 | ATCAGCGACTGCTGGCTTT | 1748 |
| chr18 | 58335323 | 58335341 | +/− | 19 | TCAGCGACTGCTGGCTTTG | 1749 |
| chr18 | 58335324 | 58335342 | +/− | 19 | CAGCGACTGCTGGCTTTGT | 1750 |
| chr18 | 58335325 | 58335343 | +/− | 19 | AGCGACTGCTGGCTTTGTC | 1751 |
| chr18 | 58335326 | 58335344 | +/− | 19 | GCGACTGCTGGCTTTGTCT | 1752 |
| chr18 | 58335327 | 58335345 | +/− | 19 | CGACTGCTGGCTTTGTCTG | 1753 |
| chr18 | 58335328 | 58335346 | +/− | 19 | GACTGCTGGCTTTGTCTGG | 1754 |
| chr18 | 58335329 | 58335347 | +/− | 19 | ACTGCTGGCTTTGTCTGGA | 1755 |
| chr18 | 58335330 | 58335348 | +/− | 19 | CTGCTGGCTTTGTCTGGAT | 1756 |
| chr18 | 58335331 | 58335349 | +/− | 19 | TGCTGGCTTTGTCTGGATA | 1757 |
| chr18 | 58335332 | 58335350 | +/− | 19 | GCTGGCTTTGTCTGGATAG | 1758 |
| chr18 | 58335333 | 58335351 | +/− | 19 | CTGGCTTTGTCTGGATAGG | 1759 |
| chr18 | 58335334 | 58335352 | +/− | 19 | TGGCTTTGTCTGGATAGGG | 1760 |
| chr18 | 58335335 | 58335353 | +/− | 19 | GGCTTTGTCTGGATAGGGT | 1761 |
| chr18 | 58335336 | 58335354 | +/− | 19 | GCTTTGTCTGGATAGGGTG | 1762 |
| chr18 | 58335337 | 58335355 | +/− | 19 | CTTTGTCTGGATAGGGTGG | 1763 |
| chr18 | 58335338 | 58335356 | +/− | 19 | TTTGTCTGGATAGGGTGGG | 1764 |
| chr18 | 58335339 | 58335357 | +/− | 19 | TTGTCTGGATAGGGTGGGT | 1765 |
| chr18 | 58335340 | 58335358 | +/− | 19 | TGTCTGGATAGGGTGGGTT | 1766 |
| chr18 | 58335341 | 58335359 | +/− | 19 | GTCTGGATAGGGTGGGTTT | 1767 |
| chr18 | 58335342 | 58335360 | +/− | 19 | TCTGGATAGGGTGGGTTTC | 1768 |
| chr18 | 58335343 | 58335361 | +/− | 19 | CTGGATAGGGTGGGTTTCA | 1769 |
| chr18 | 58335344 | 58335362 | +/− | 19 | TGGATAGGGTGGGTTTCAG | 1770 |
| chr18 | 58335345 | 58335363 | +/− | 19 | GGATAGGGTGGGTTTCAGG | 1771 |
| chr18 | 58335346 | 58335364 | +/− | 19 | GATAGGGTGGGTTTCAGGG | 1772 |
| chr18 | 58335347 | 58335365 | +/− | 19 | ATAGGGTGGGTTTCAGGGA | 1773 |
| chr18 | 58335348 | 58335366 | +/− | 19 | TAGGGTGGGTTTCAGGGAT | 1774 |
| chr18 | 58335349 | 58335367 | +/− | 19 | AGGGTGGGTTTCAGGGATT | 1775 |
| chr18 | 58335350 | 58335368 | +/− | 19 | GGGTGGGTTTCAGGGATTC | 1776 |
| chr18 | 58335351 | 58335369 | +/− | 19 | GGTGGGTTTCAGGGATTCT | 1777 |
| chr18 | 58335352 | 58335370 | +/− | 19 | GTGGGTTTCAGGGATTCTG | 1778 |
| chr18 | 58335353 | 58335371 | +/− | 19 | TGGGTTTCAGGGATTCTGA | 1779 |
| chr18 | 58335354 | 58335372 | +/− | 19 | GGGTTTCAGGGATTCTGAT | 1780 |
| chr18 | 58335355 | 58335373 | +/− | 19 | GGTTTCAGGGATTCTGATC | 1781 |
| chr18 | 58335356 | 58335374 | +/− | 19 | GTTTCAGGGATTCTGATCT | 1782 |
| chr18 | 58335357 | 58335375 | +/− | 19 | TTTCAGGGATTCTGATCTC | 1783 |
| chr18 | 58335358 | 58335376 | +/− | 19 | TTCAGGGATTCTGATCTCA | 1784 |
| chr18 | 58335359 | 58335377 | +/− | 19 | TCAGGGATTCTGATCTCAC | 1785 |
| chr18 | 58335360 | 58335378 | +/− | 19 | CAGGGATTCTGATCTCACG | 1786 |
| chr18 | 58335361 | 58335379 | +/− | 19 | AGGGATTCTGATCTCACGT | 1787 |
| chr18 | 58335362 | 58335380 | +/− | 19 | GGGATTCTGATCTCACGTC | 1788 |
| chr18 | 58335363 | 58335381 | +/− | 19 | GGATTCTGATCTCACGTCA | 1789 |
| chr18 | 58335364 | 58335382 | +/− | 19 | GATTCTGATCTCACGTCAC | 1790 |
| chr18 | 58335365 | 58335383 | +/− | 19 | ATTCTGATCTCACGTCACC | 1791 |
| chr18 | 58335366 | 58335384 | +/− | 19 | TTCTGATCTCACGTCACCT | 1792 |
| chr18 | 58335367 | 58335385 | +/− | 19 | TCTGATCTCACGTCACCTG | 1793 |
| chr18 | 58335368 | 58335386 | +/− | 19 | CTGATCTCACGTCACCTGC | 1794 |
| chr18 | 58335369 | 58335387 | +/− | 19 | TGATCTCACGTCACCTGCC | 1795 |
| chr18 | 58335370 | 58335388 | +/− | 19 | GATCTCACGTCACCTGCCT | 1796 |
| chr18 | 58335371 | 58335389 | +/− | 19 | ATCTCACGTCACCTGCCTT | 1797 |
| chr18 | 58335372 | 58335390 | +/− | 19 | TCTCACGTCACCTGCCTTA | 1798 |
| chr18 | 58335373 | 58335391 | +/− | 19 | CTCACGTCACCTGCCTTAC | 1799 |
| chr18 | 58335374 | 58335392 | +/− | 19 | TCACGTCACCTGCCTTACA | 1800 |
| chr18 | 58335375 | 58335393 | +/− | 19 | CACGTCACCTGCCTTACAG | 1801 |
| chr18 | 58335376 | 58335394 | +/− | 19 | ACGTCACCTGCCTTACAGC | 1802 |
| chr18 | 58335377 | 58335395 | +/− | 19 | CGTCACCTGCCTTACAGCG | 1803 |
| chr18 | 58335378 | 58335396 | +/− | 19 | GTCACCTGCCTTACAGCGC | 1804 |
| chr18 | 58335379 | 58335397 | +/− | 19 | TCACCTGCCTTACAGCGCT | 1805 |
| chr18 | 58335380 | 58335398 | +/− | 19 | CACCTGCCTTACAGCGCTG | 1806 |
| chr18 | 58335381 | 58335399 | +/− | 19 | ACCTGCCTTACAGCGCTGC | 1807 |
| chr18 | 58335382 | 58335400 | +/− | 19 | CCTGCCTTACAGCGCTGCC | 1808 |
| chr18 | 58335383 | 58335401 | +/− | 19 | CTGCCTTACAGCGCTGCCA | 1809 |
| chr18 | 58335384 | 58335402 | +/− | 19 | TGCCTTACAGCGCTGCCAC | 1810 |
| chr18 | 58335385 | 58335403 | +/− | 19 | GCCTTACAGCGCTGCCACA | 1811 |
| chr18 | 58335386 | 58335404 | +/− | 19 | CCTTACAGCGCTGCCACAG | 1812 |
| chr18 | 58335387 | 58335405 | +/− | 19 | CTTACAGCGCTGCCACAGC | 1813 |
| chr18 | 58335388 | 58335406 | +/− | 19 | TTACAGCGCTGCCACAGCA | 1814 |
| chr18 | 58335389 | 58335407 | +/− | 19 | TACAGCGCTGCCACAGCAG | 1815 |
| chr18 | 58335390 | 58335408 | +/− | 19 | ACAGCGCTGCCACAGCAGT | 1816 |
| chr18 | 58335391 | 58335409 | +/− | 19 | CAGCGCTGCCACAGCAGTG | 1817 |
| chr18 | 58335392 | 58335410 | +/− | 19 | AGCGCTGCCACAGCAGTGG | 1818 |
| chr18 | 58335393 | 58335411 | +/− | 19 | GCGCTGCCACAGCAGTGGG | 1819 |
| chr18 | 58335394 | 58335412 | +/− | 19 | CGCTGCCACAGCAGTGGGC | 1820 |
| chr18 | 58335395 | 58335413 | +/− | 19 | GCTGCCACAGCAGTGGGCC | 1821 |
| chr18 | 58335396 | 58335414 | +/− | 19 | CTGCCACAGCAGTGGGCCC | 1822 |
| chr18 | 58335397 | 58335415 | +/− | 19 | TGCCACAGCAGTGGGCCCT | 1823 |
| chr18 | 58335398 | 58335416 | +/− | 19 | GCCACAGCAGTGGGCCCTG | 1824 |
| chr18 | 58335399 | 58335417 | +/− | 19 | CCACAGCAGTGGGCCCTGA | 1825 |
| chr18 | 58335400 | 58335418 | +/− | 19 | CACAGCAGTGGGCCCTGAT | 1826 |
| chr18 | 58335401 | 58335419 | +/− | 19 | ACAGCAGTGGGCCCTGATT | 1827 |
| chr18 | 58335402 | 58335420 | +/− | 19 | CAGCAGTGGGCCCTGATTC | 1828 |
| chr18 | 58335403 | 58335421 | +/− | 19 | AGCAGTGGGCCCTGATTCA | 1829 |
| chr18 | 58335404 | 58335422 | +/− | 19 | GCAGTGGGCCCTGATTCAG | 1830 |
| chr18 | 58335405 | 58335423 | +/− | 19 | CAGTGGGCCCTGATTCAGA | 1831 |
| chr18 | 58335406 | 58335424 | +/− | 19 | AGTGGGCCCTGATTCAGAC | 1832 |
| chr18 | 58335407 | 58335425 | +/− | 19 | GTGGGCCCTGATTCAGACA | 1833 |
| chr18 | 58335408 | 58335426 | +/− | 19 | TGGGCCCTGATTCAGACAG | 1834 |
| chr18 | 58335409 | 58335427 | +/− | 19 | GGGCCCTGATTCAGACAGC | 1835 |
| chr18 | 58335410 | 58335428 | +/− | 19 | GGCCCTGATTCAGACAGCA | 1836 |
| chr18 | 58335411 | 58335429 | +/− | 19 | GCCCTGATTCAGACAGCAG | 1837 |
| chr18 | 58335412 | 58335430 | +/− | 19 | CCCTGATTCAGACAGCAGG | 1838 |
| chr18 | 58335317 | 58335335 | +/− | 19 | TGGTCATCAGCGACTGCTG | 1839 |
| chr18 | 58335413 | 58335431 | +/− | 19 | CCTGATTCAGACAGCAGGG | 1840 |
| chr18 | 58335414 | 58335432 | +/− | 19 | CTGATTCAGACAGCAGGGG | 1841 |
| chr18 | 58335415 | 58335433 | +/− | 19 | TGATTCAGACAGCAGGGGG | 1842 |
| chr18 | 58335416 | 58335434 | +/− | 19 | GATTCAGACAGCAGGGGGT | 1843 |
| chr18 | 58335417 | 58335435 | +/− | 19 | ATTCAGACAGCAGGGGGTC | 1844 |
| chr18 | 58335418 | 58335436 | +/− | 19 | TTCAGACAGCAGGGGGTCA | 1845 |
| chr18 | 58335419 | 58335437 | +/− | 19 | TCAGACAGCAGGGGGTCAT | 1846 |
| chr18 | 58335420 | 58335438 | +/− | 19 | CAGACAGCAGGGGGTCATC | 1847 |
| chr18 | 58335421 | 58335439 | +/− | 19 | AGACAGCAGGGGGTCATCC | 1848 |
| chr18 | 58335422 | 58335440 | +/− | 19 | GACAGCAGGGGGTCATCCC | 1849 |
| chr18 | 58335423 | 58335441 | +/− | 19 | ACAGCAGGGGGTCATCCCC | 1850 |
| chr18 | 58335424 | 58335442 | +/− | 19 | CAGCAGGGGGTCATCCCCT | 1851 |
| chr18 | 58335425 | 58335443 | +/− | 19 | AGCAGGGGGTCATCCCCTA | 1852 |
| chr18 | 58335426 | 58335444 | +/− | 19 | GCAGGGGGTCATCCCCTAA | 1853 |
| chr18 | 58335427 | 58335445 | +/− | 19 | CAGGGGGTCATCCCCTAAG | 1854 |
| chr18 | 58335428 | 58335446 | +/− | 19 | AGGGGGTCATCCCCTAAGT | 1855 |
| chr18 | 58335429 | 58335447 | +/− | 19 | GGGGGTCATCCCCTAAGTG | 1856 |

TABLE 13
20-mer target-specific ASOs

| | | | | | | SEQ |
|---|---|---|---|---|---|---|
| | | | | | | ID |
| CHR | START | END | STRAND | Kmer | SEQUENCE | NO: |
| chr18 | 58335318 | 58335337 | +/− | 20 | GGTCATCAGCGACTGCTGGC | 1857 |
| chr18 | 58335319 | 58335338 | +/− | 20 | GTCATCAGCGACTGCTGGCT | 1858 |
| chr18 | 58335320 | 58335339 | +/− | 20 | TCATCAGCGACTGCTGGCTT | 1859 |
| chr18 | 58335321 | 58335340 | +/− | 20 | CATCAGCGACTGCTGGCTTT | 1860 |
| chr18 | 58335322 | 58335341 | +/− | 20 | ATCAGCGACTGCTGGCTTTG | 1861 |
| chr18 | 58335323 | 58335342 | +/− | 20 | TCAGCGACTGCTGGCTTTGT | 1862 |
| chr18 | 58335324 | 58335343 | +/− | 20 | CAGCGACTGCTGGCTTTGTC | 1863 |
| chr18 | 58335325 | 58335344 | +/− | 20 | AGCGACTGCTGGCTTTGTCT | 1864 |
| chr18 | 58335326 | 58335345 | +/− | 20 | GCGACTGCTGGCTTTGTCTG | 1865 |
| chr18 | 58335327 | 58335346 | +/− | 20 | CGACTGCTGGCTTTGTCTGG | 1866 |
| chr18 | 58335328 | 58335347 | +/− | 20 | GACTGCTGGCTTTGTCTGGA | 1867 |
| chr18 | 58335329 | 58335348 | +/− | 20 | ACTGCTGGCTTTGTCTGGAT | 1868 |
| chr18 | 58335330 | 58335349 | +/− | 20 | CTGCTGGCTTTGTCTGGATA | 1869 |
| chr18 | 58335331 | 58335350 | +/− | 20 | TGCTGGCTTTGTCTGGATAG | 1870 |
| chr18 | 58335332 | 58335351 | +/− | 20 | GCTGGCTTTGTCTGGATAGG | 3 |
| chr18 | 58335333 | 58335352 | +/− | 20 | CTGGCTTTGTCTGGATAGGG | 1871 |
| chr18 | 58335334 | 58335353 | +/− | 20 | TGGCTTTGTCTGGATAGGGT | 1872 |
| chr18 | 58335335 | 58335354 | +/− | 20 | GGCTTTGTCTGGATAGGGTG | 1873 |
| chr18 | 58335336 | 58335355 | +/− | 20 | GCTTTGTCTGGATAGGGTGG | 1874 |
| chr18 | 58335337 | 58335356 | +/− | 20 | CTTTGTCTGGATAGGGTGGG | 1875 |
| chr18 | 58335338 | 58335357 | +/− | 20 | TTTGTCTGGATAGGGTGGGT | 1876 |
| chr18 | 58335339 | 58335358 | +/− | 20 | TTGTCTGGATAGGGTGGGTT | 1877 |
| chr18 | 58335340 | 58335359 | +/− | 20 | TGTCTGGATAGGGTGGGTTT | 1878 |
| chr18 | 58335341 | 58335360 | +/− | 20 | GTCTGGATAGGGTGGGTTTC | 1879 |
| chr18 | 58335342 | 58335361 | +/− | 20 | TCTGGATAGGGTGGGTTTCA | 1880 |
| chr18 | 58335343 | 58335362 | +/− | 20 | CTGGATAGGGTGGGTTTCAG | 1881 |
| chr18 | 58335344 | 58335363 | +/− | 20 | TGGATAGGGTGGGTTTCAGG | 1882 |
| chr18 | 58335345 | 58335364 | +/− | 20 | GGATAGGGTGGGTTTCAGGG | 1883 |
| chr18 | 58335346 | 58335365 | +/− | 20 | GATAGGGTGGGTTTCAGGGA | 1884 |
| chr18 | 58335347 | 58335366 | +/− | 20 | ATAGGGTGGGTTTCAGGGAT | 1885 |
| chr18 | 58335348 | 58335367 | +/− | 20 | TAGGGTGGGTTTCAGGGATT | 1886 |
| chr18 | 58335349 | 58335368 | +/− | 20 | AGGGTGGGTTTCAGGGATTC | 1887 |
| chr18 | 58335350 | 58335369 | +/− | 20 | GGGTGGGTTTCAGGGATTCT | 1888 |
| chr18 | 58335351 | 58335370 | +/− | 20 | GGTGGGTTTCAGGGATTCTG | 1889 |
| chr18 | 58335352 | 58335371 | +/− | 20 | GTGGGTTTCAGGGATTCTGA | 1 |
| chr18 | 58335353 | 58335372 | +/− | 20 | TGGGTTTCAGGGATTCTGAT | 1890 |
| chr18 | 58335354 | 58335373 | +/− | 20 | GGGTTTCAGGGATTCTGATC | 1891 |
| chr18 | 58335355 | 58335374 | +/− | 20 | GGTTTCAGGGATTCTGATCT | 1892 |
| chr18 | 58335356 | 58335375 | +/− | 20 | GTTTCAGGGATTCTGATCTC | 1893 |
| chr18 | 58335357 | 58335376 | +/− | 20 | TTTCAGGGATTCTGATCTCA | 1894 |
| chr18 | 58335358 | 58335377 | +/− | 20 | TTCAGGGATTCTGATCTCAC | 1895 |
| chr18 | 58335359 | 58335378 | +/− | 20 | TCAGGGATTCTGATCTCACG | 1896 |
| chr18 | 58335360 | 58335379 | +/− | 20 | CAGGGATTCTGATCTCACGT | 1897 |
| chr18 | 58335361 | 58335380 | +/− | 20 | AGGGATTCTGATCTCACGTC | 1898 |
| chr18 | 58335362 | 58335381 | +/− | 20 | GGGATTCTGATCTCACGTCA | 1899 |
| chr18 | 58335363 | 58335382 | +/− | 20 | GGATTCTGATCTCACGTCAC | 1900 |
| chr18 | 58335364 | 58335383 | +/− | 20 | GATTCTGATCTCACGTCACC | 1901 |
| chr18 | 58335365 | 58335384 | +/− | 20 | ATTCTGATCTCACGTCACCT | 1902 |
| chr18 | 58335366 | 58335385 | +/− | 20 | TTCTGATCTCACGTCACCTG | 1903 |
| chr18 | 58335367 | 58335386 | +/− | 20 | TCTGATCTCACGTCACCTGC | 1904 |
| chr18 | 58335368 | 58335387 | +/− | 20 | CTGATCTCACGTCACCTGCC | 1905 |
| chr18 | 58335369 | 58335388 | +/− | 20 | TGATCTCACGTCACCTGCCT | 1906 |
| chr18 | 58335370 | 58335389 | +/− | 20 | GATCTCACGTCACCTGCCTT | 1907 |
| chr18 | 58335371 | 58335390 | +/− | 20 | ATCTCACGTCACCTGCCTTA | 1908 |
| chr18 | 58335372 | 58335391 | +/− | 20 | TCTCACGTCACCTGCCTTAC | 4 |
| chr18 | 58335373 | 58335392 | +/− | 20 | CTCACGTCACCTGCCTTACA | 1909 |
| chr18 | 58335374 | 58335393 | +/− | 20 | TCACGTCACCTGCCTTACAG | 1910 |
| chr18 | 58335375 | 58335394 | +/− | 20 | CACGTCACCTGCCTTACAGC | 1911 |
| chr18 | 58335376 | 58335395 | +/− | 20 | ACGTCACCTGCCTTACAGCG | 1912 |
| chr18 | 58335377 | 58335396 | +/− | 20 | CGTCACCTGCCTTACAGCGC | 1913 |
| chr18 | 58335378 | 58335397 | +/− | 20 | GTCACCTGCCTTACAGCGCT | 1914 |
| chr18 | 58335379 | 58335398 | +/− | 20 | TCACCTGCCTTACAGCGCTG | 1915 |
| chr18 | 58335380 | 58335399 | +/− | 20 | CACCTGCCTTACAGCGCTGC | 1916 |
| chr18 | 58335381 | 58335400 | +/− | 20 | ACCTGCCTTACAGCGCTGCC | 1917 |
| chr18 | 58335382 | 58335401 | +/− | 20 | CCTGCCTTACAGCGCTGCCA | 1918 |
| chr18 | 58335383 | 58335402 | +/− | 20 | CTGCCTTACAGCGCTGCCAC | 1919 |
| chr18 | 58335384 | 58335403 | +/− | 20 | TGCCTTACAGCGCTGCCACA | 1920 |
| chr18 | 58335385 | 58335404 | +/− | 20 | GCCTTACAGCGCTGCCACAG | 1921 |
| chr18 | 58335386 | 58335405 | +/− | 20 | CCTTACAGCGCTGCCACAGC | 1922 |
| chr18 | 58335387 | 58335406 | +/− | 20 | CTTACAGCGCTGCCACAGCA | 1923 |
| chr18 | 58335388 | 58335407 | +/− | 20 | TTACAGCGCTGCCACAGCAG | 1924 |
| chr18 | 58335389 | 58335408 | +/− | 20 | TACAGCGCTGCCACAGCAGT | 1925 |
| chr18 | 58335390 | 58335409 | +/− | 20 | ACAGCGCTGCCACAGCAGTG | 1926 |
| chr18 | 58335391 | 58335410 | +/− | 20 | CAGCGCTGCCACAGCAGTGG | 1927 |
| chr18 | 58335392 | 58335411 | +/− | 20 | AGCGCTGCCACAGCAGTGGG | 5 |
| chr18 | 58335393 | 58335412 | +/− | 20 | GCGCTGCCACAGCAGTGGGC | 1928 |
| chr18 | 58335394 | 58335413 | +/− | 20 | CGCTGCCACAGCAGTGGGCC | 1929 |
| chr18 | 58335395 | 58335414 | +/− | 20 | GCTGCCACAGCAGTGGGCCC | 1930 |
| chr18 | 58335396 | 58335415 | +/− | 20 | CTGCCACAGCAGTGGGCCCT | 1931 |
| chr18 | 58335397 | 58335416 | +/− | 20 | TGCCACAGCAGTGGGCCCTG | 1932 |
| chr18 | 58335398 | 58335417 | +/− | 20 | GCCACAGCAGTGGGCCCTGA | 1933 |
| chr18 | 58335399 | 58335418 | +/− | 20 | CCACAGCAGTGGGCCCTGAT | 1934 |
| chr18 | 58335400 | 58335419 | +/− | 20 | CACAGCAGTGGGCCCTGATT | 1935 |
| chr18 | 58335401 | 58335420 | +/− | 20 | ACAGCAGTGGGCCCTGATTC | 1936 |
| chr18 | 58335402 | 58335421 | +/− | 20 | CAGCAGTGGGCCCTGATTCA | 1937 |
| chr18 | 58335403 | 58335422 | +/− | 20 | AGCAGTGGGCCCTGATTCAG | 1938 |
| chr18 | 58335404 | 58335423 | +/− | 20 | GCAGTGGGCCCTGATTCAGA | 1939 |
| chr18 | 58335405 | 58335424 | +/− | 20 | CAGTGGGCCCTGATTCAGAC | 1940 |
| chr18 | 58335406 | 58335425 | +/− | 20 | AGTGGGCCCTGATTCAGACA | 1941 |
| chr18 | 58335407 | 58335426 | +/− | 20 | GTGGGCCCTGATTCAGACAG | 1942 |
| chr18 | 58335408 | 58335427 | +/− | 20 | TGGGCCCTGATTCAGACAGC | 1943 |
| chr18 | 58335409 | 58335428 | +/− | 20 | GGGCCCTGATTCAGACAGCA | 1944 |
| chr18 | 58335410 | 58335429 | +/− | 20 | GGCCCTGATTCAGACAGCAG | 1945 |
| chr18 | 58335411 | 58335430 | +/− | 20 | GCCCTGATTCAGACAGCAGG | 1946 |
| chr18 | 58335317 | 58335336 | +/− | 20 | TGGTCATCAGCGACTGCTGG | 1947 |
| chr18 | 58335412 | 58335431 | +/− | 20 | CCCTGATTCAGACAGCAGGG | 2 |
| chr18 | 58335413 | 58335432 | +/− | 20 | CCTGATTCAGACAGCAGGGG | 1948 |
| chr18 | 58335414 | 58335433 | +/− | 20 | CTGATTCAGACAGCAGGGGG | 1949 |
| chr18 | 58335415 | 58335434 | +/− | 20 | TGATTCAGACAGCAGGGGGT | 1950 |
| chr18 | 58335416 | 58335435 | +/− | 20 | GATTCAGACAGCAGGGGGTC | 1951 |
| chr18 | 58335417 | 58335436 | +/− | 20 | ATTCAGACAGCAGGGGGTCA | 1952 |
| chr18 | 58335418 | 58335437 | +/− | 20 | TTCAGACAGCAGGGGGTCAT | 1953 |
| chr18 | 58335419 | 58335438 | +/− | 20 | TCAGACAGCAGGGGGTCATC | 1954 |
| chr18 | 58335420 | 58335439 | +/− | 20 | CAGACAGCAGGGGGTCATCC | 1955 |
| chr18 | 58335421 | 58335440 | +/− | 20 | AGACAGCAGGGGGTCATCCC | 1956 |
| chr18 | 58335422 | 58335441 | +/− | 20 | GACAGCAGGGGGTCATCCCC | 1957 |
| chr18 | 58335423 | 58335442 | +/− | 20 | ACAGCAGGGGGTCATCCCCT | 1958 |
| chr18 | 58335424 | 58335443 | +/− | 20 | CAGCAGGGGGTCATCCCCTA | 1959 |
| chr18 | 58335425 | 58335444 | +/− | 20 | AGCAGGGGGTCATCCCCTAA | 1960 |
| chr18 | 58335426 | 58335445 | +/− | 20 | GCAGGGGGTCATCCCCTAAG | 1961 |
| chr18 | 58335427 | 58335446 | +/− | 20 | CAGGGGGTCATCCCCTAAGT | 1962 |
| chr18 | 58335428 | 58335447 | +/− | 20 | AGGGGGTCATCCCCTAAGTG | 1963 |

TABLE 14
21-mer target-specific ASOs

| | | | | | | SEQ |
|---|---|---|---|---|---|---|
| | | | | | | ID |
| CHR | START | END | STRAND | Kmer | SEQUENCE | NO: |
| chr18 | 58335318 | 58335338 | +/− | 21 | GGTCATCAGCGACTGCTGGCT | 1964 |
| chr18 | 58335319 | 58335339 | +/− | 21 | GTCATCAGCGACTGCTGGCTT | 1965 |
| chr18 | 58335320 | 58335340 | +/− | 21 | TCATCAGCGACTGCTGGCTTT | 1966 |
| chr18 | 58335321 | 58335341 | +/− | 21 | CATCAGCGACTGCTGGCTTTG | 1967 |
| chr18 | 58335322 | 58335342 | +/− | 21 | ATCAGCGACTGCTGGCTTTGT | 1968 |
| chr18 | 58335323 | 58335343 | +/− | 21 | TCAGCGACTGCTGGCTTTGTC | 1969 |
| chr18 | 58335324 | 58335344 | +/− | 21 | CAGCGACTGCTGGCTTTGTCT | 1970 |
| chr18 | 58335325 | 58335345 | +/− | 21 | AGCGACTGCTGGCTTTGTCTG | 1971 |
| chr18 | 58335326 | 58335346 | +/− | 21 | GCGACTGCTGGCTTTGTCTGG | 1972 |
| chr18 | 58335327 | 58335347 | +/− | 21 | CGACTGCTGGCTTTGTCTGGA | 1973 |
| chr18 | 58335328 | 58335348 | +/− | 21 | GACTGCTGGCTTTGTCTGGAT | 1974 |
| chr18 | 58335329 | 58335349 | +/− | 21 | ACTGCTGGCTTTGTCTGGATA | 1975 |
| chr18 | 58335330 | 58335350 | +/− | 21 | CTGCTGGCTTTGTCTGGATAG | 1976 |
| chr18 | 58335331 | 58335351 | +/− | 21 | TGCTGGCTTTGTCTGGATAGG | 1977 |
| chr18 | 58335332 | 58335352 | +/− | 21 | GCTGGCTTTGTCTGGATAGGG | 1978 |
| chr18 | 58335333 | 58335353 | +/− | 21 | CTGGCTTTGTCTGGATAGGGT | 1979 |
| chr18 | 58335334 | 58335354 | +/− | 21 | TGGCTTTGTCTGGATAGGGTG | 1980 |
| chr18 | 58335335 | 58335355 | +/− | 21 | GGCTTTGTCTGGATAGGGTGG | 1981 |
| chr18 | 58335336 | 58335356 | +/− | 21 | GCTTTGTCTGGATAGGGTGGG | 1982 |
| chr18 | 58335337 | 58335357 | +/− | 21 | CTTTGTCTGGATAGGGTGGGT | 1983 |
| chr18 | 58335338 | 58335358 | +/− | 21 | TTTGTCTGGATAGGGTGGGTT | 1984 |
| chr18 | 58335339 | 58335359 | +/− | 21 | TTGTCTGGATAGGGTGGGTTT | 1985 |
| chr18 | 58335340 | 58335360 | +/− | 21 | TGTCTGGATAGGGTGGGTTTC | 1986 |
| chr18 | 58335341 | 58335361 | +/− | 21 | GTCTGGATAGGGTGGGTTTCA | 1987 |
| chr18 | 58335342 | 58335362 | +/− | 21 | TCTGGATAGGGTGGGTTTCAG | 1988 |
| chr18 | 58335343 | 58335363 | +/− | 21 | CTGGATAGGGTGGGTTTCAGG | 1989 |
| chr18 | 58335344 | 58335364 | +/− | 21 | TGGATAGGGTGGGTTTCAGGG | 1990 |
| chr18 | 58335345 | 58335365 | +/− | 21 | GGATAGGGTGGGTTTCAGGGA | 1991 |
| chr18 | 58335346 | 58335366 | +/− | 21 | GATAGGGTGGGTTTCAGGGAT | 1992 |
| chr18 | 58335347 | 58335367 | +/− | 21 | ATAGGGTGGGTTTCAGGGATT | 1993 |
| chr18 | 58335348 | 58335368 | +/− | 21 | TAGGGTGGGTTTCAGGGATTC | 1994 |
| chr18 | 58335349 | 58335369 | +/− | 21 | AGGGTGGGTTTCAGGGATTCT | 1995 |
| chr18 | 58335350 | 58335370 | +/− | 21 | GGGTGGGTTTCAGGGATTCTG | 1996 |
| chr18 | 58335351 | 58335371 | +/− | 21 | GGTGGGTTTCAGGGATTCTGA | 1997 |
| chr18 | 58335352 | 58335372 | +/− | 21 | GTGGGTTTCAGGGATTCTGAT | 1998 |
| chr18 | 58335353 | 58335373 | +/− | 21 | TGGGTTTCAGGGATTCTGATC | 1999 |
| chr18 | 58335354 | 58335374 | +/− | 21 | GGGTTTCAGGGATTCTGATCT | 2000 |
| chr18 | 58335355 | 58335375 | +/− | 21 | GGTTTCAGGGATTCTGATCTC | 2001 |
| chr18 | 58335356 | 58335376 | +/− | 21 | GTTTCAGGGATTCTGATCTCA | 2002 |
| chr18 | 58335357 | 58335377 | +/− | 21 | TTTCAGGGATTCTGATCTCAC | 2003 |
| chr18 | 58335358 | 58335378 | +/− | 21 | TTCAGGGATTCTGATCTCACG | 2004 |
| chr18 | 58335359 | 58335379 | +/− | 21 | TCAGGGATTCTGATCTCACGT | 2005 |
| chr18 | 58335360 | 58335380 | +/− | 21 | CAGGGATTCTGATCTCACGTC | 2006 |
| chr18 | 58335361 | 58335381 | +/− | 21 | AGGGATTCTGATCTCACGTCA | 2007 |
| chr18 | 58335362 | 58335382 | +/− | 21 | GGGATTCTGATCTCACGTCAC | 2008 |
| chr18 | 58335363 | 58335383 | +/− | 21 | GGATTCTGATCTCACGTCACC | 2009 |
| chr18 | 58335364 | 58335384 | +/− | 21 | GATTCTGATCTCACGTCACCT | 2010 |
| chr18 | 58335365 | 58335385 | +/− | 21 | ATTCTGATCTCACGTCACCTG | 2011 |
| chr18 | 58335366 | 58335386 | +/− | 21 | TTCTGATCTCACGTCACCTGC | 2012 |
| chr18 | 58335367 | 58335387 | +/− | 21 | TCTGATCTCACGTCACCTGCC | 2013 |
| chr18 | 58335368 | 58335388 | +/− | 21 | CTGATCTCACGTCACCTGCCT | 2014 |
| chr18 | 58335369 | 58335389 | +/− | 21 | TGATCTCACGTCACCTGCCTT | 2015 |
| chr18 | 58335370 | 58335390 | +/− | 21 | GATCTCACGTCACCTGCCTTA | 2016 |
| chr18 | 58335371 | 58335391 | +/− | 21 | ATCTCACGTCACCTGCCTTAC | 2017 |
| chr18 | 58335372 | 58335392 | +/− | 21 | TCTCACGTCACCTGCCTTACA | 2018 |
| chr18 | 58335373 | 58335393 | +/− | 21 | CTCACGTCACCTGCCTTACAG | 2019 |
| chr18 | 58335374 | 58335394 | +/− | 21 | TCACGTCACCTGCCTTACAGC | 2020 |
| chr18 | 58335375 | 58335395 | +/− | 21 | CACGTCACCTGCCTTACAGCG | 2021 |
| chr18 | 58335376 | 58335396 | +/− | 21 | ACGTCACCTGCCTTACAGCGC | 2022 |
| chr18 | 58335377 | 58335397 | +/− | 21 | CGTCACCTGCCTTACAGCGCT | 2023 |
| chr18 | 58335378 | 58335398 | +/− | 21 | GTCACCTGCCTTACAGCGCTG | 2024 |
| chr18 | 58335379 | 58335399 | +/− | 21 | TCACCTGCCTTACAGCGCTGC | 2025 |
| chr18 | 58335380 | 58335400 | +/− | 21 | CACCTGCCTTACAGCGCTGCC | 2026 |
| chr18 | 58335381 | 58335401 | +/− | 21 | ACCTGCCTTACAGCGCTGCCA | 2027 |
| chr18 | 58335382 | 58335402 | +/− | 21 | CCTGCCTTACAGCGCTGCCAC | 2028 |
| chr18 | 58335383 | 58335403 | +/− | 21 | CTGCCTTACAGCGCTGCCACA | 2029 |
| chr18 | 58335384 | 58335404 | +/− | 21 | TGCCTTACAGCGCTGCCACAG | 2030 |
| chr18 | 58335385 | 58335405 | +/− | 21 | GCCTTACAGCGCTGCCACAGC | 2031 |
| chr18 | 58335386 | 58335406 | +/− | 21 | CCTTACAGCGCTGCCACAGCA | 2032 |
| chr18 | 58335387 | 58335407 | +/− | 21 | CTTACAGCGCTGCCACAGCAG | 2033 |
| chr18 | 58335388 | 58335408 | +/− | 21 | TTACAGCGCTGCCACAGCAGT | 2034 |
| chr18 | 58335389 | 58335409 | +/− | 21 | TACAGCGCTGCCACAGCAGTG | 2035 |
| chr18 | 58335390 | 58335410 | +/− | 21 | ACAGCGCTGCCACAGCAGTGG | 2036 |
| chr18 | 58335391 | 58335411 | +/− | 21 | CAGCGCTGCCACAGCAGTGGG | 2037 |
| chr18 | 58335392 | 58335412 | +/− | 21 | AGCGCTGCCACAGCAGTGGGC | 2038 |
| chr18 | 58335393 | 58335413 | +/− | 21 | GCGCTGCCACAGCAGTGGGCC | 2039 |
| chr18 | 58335394 | 58335414 | +/− | 21 | CGCTGCCACAGCAGTGGGCCC | 2040 |
| chr18 | 58335395 | 58335415 | +/− | 21 | GCTGCCACAGCAGTGGGCCCT | 2041 |
| chr18 | 58335396 | 58335416 | +/− | 21 | CTGCCACAGCAGTGGGCCCTG | 2042 |
| chr18 | 58335397 | 58335417 | +/− | 21 | TGCCACAGCAGTGGGCCCTGA | 2043 |
| chr18 | 58335398 | 58335418 | +/− | 21 | GCCACAGCAGTGGGCCCTGAT | 2044 |
| chr18 | 58335399 | 58335419 | +/− | 21 | CCACAGCAGTGGGCCCTGATT | 2045 |
| chr18 | 58335400 | 58335420 | +/− | 21 | CACAGCAGTGGGCCCTGATTC | 2046 |
| chr18 | 58335401 | 58335421 | +/− | 21 | ACAGCAGTGGGCCCTGATTCA | 2047 |
| chr18 | 58335402 | 58335422 | +/− | 21 | CAGCAGTGGGCCCTGATTCAG | 2048 |
| chr18 | 58335403 | 58335423 | +/− | 21 | AGCAGTGGGCCCTGATTCAGA | 2049 |
| chr18 | 58335404 | 58335424 | +/− | 21 | GCAGTGGGCCCTGATTCAGAC | 2050 |
| chr18 | 58335405 | 58335425 | +/− | 21 | CAGTGGGCCCTGATTCAGACA | 2051 |
| chr18 | 58335406 | 58335426 | +/− | 21 | AGTGGGCCCTGATTCAGACAG | 2052 |
| chr18 | 58335407 | 58335427 | +/− | 21 | GTGGGCCCTGATTCAGACAGC | 2053 |
| chr18 | 58335408 | 58335428 | +/− | 21 | TGGGCCCTGATTCAGACAGCA | 2054 |
| chr18 | 58335409 | 58335429 | +/− | 21 | GGGCCCTGATTCAGACAGCAG | 2055 |
| chr18 | 58335410 | 58335430 | +/− | 21 | GGCCCTGATTCAGACAGCAGG | 2056 |
| chr18 | 58335317 | 58335337 | +/− | 21 | TGGTCATCAGCGACTGCTGGC | 2057 |
| chr18 | 58335411 | 58335431 | +/− | 21 | GCCCTGATTCAGACAGCAGGG | 2058 |
| chr18 | 58335412 | 58335432 | +/− | 21 | CCCTGATTCAGACAGCAGGGG | 2059 |
| chr18 | 58335413 | 58335433 | +/− | 21 | CCTGATTCAGACAGCAGGGGG | 2060 |
| chr18 | 58335414 | 58335434 | +/− | 21 | CTGATTCAGACAGCAGGGGGT | 2061 |
| chr18 | 58335415 | 58335435 | +/− | 21 | TGATTCAGACAGCAGGGGGTC | 2062 |
| chr18 | 58335416 | 58335436 | +/− | 21 | GATTCAGACAGCAGGGGGTCA | 2063 |
| chr18 | 58335417 | 58335437 | +/− | 21 | ATTCAGACAGCAGGGGGTCAT | 2064 |
| chr18 | 58335418 | 58335438 | +/− | 21 | TTCAGACAGCAGGGGGTCATC | 2065 |
| chr18 | 58335419 | 58335439 | +/− | 21 | TCAGACAGCAGGGGGTCATCC | 2066 |
| chr18 | 58335420 | 58335440 | +/− | 21 | CAGACAGCAGGGGGTCATCCC | 2067 |
| chr18 | 58335421 | 58335441 | +/− | 21 | AGACAGCAGGGGGTCATCCCC | 2068 |
| chr18 | 58335422 | 58335442 | +/− | 21 | GACAGCAGGGGGTCATCCCCT | 2069 |
| chr18 | 58335423 | 58335443 | +/− | 21 | ACAGCAGGGGGTCATCCCCTA | 2070 |
| chr18 | 58335424 | 58335444 | +/− | 21 | CAGCAGGGGGTCATCCCCTAA | 2071 |
| chr18 | 58335425 | 58335445 | +/− | 21 | AGCAGGGGGTCATCCCCTAAG | 2072 |
| chr18 | 58335426 | 58335446 | +/− | 21 | GCAGGGGGTCATCCCCTAAGT | 2073 |
| chr18 | 58335427 | 58335447 | +/− | 21 | CAGGGGGTCATCCCCTAAGTG | 2074 |

TABLE 15
22-mer target-specific ASOs

| | | | | | | SEQ |
|---|---|---|---|---|---|---|
| | | | | | | ID |
| CHR | START | END | STRAND | Kmer | SEQUENCE | NO: |
| chr18 | 58335318 | 58335339 | +/− | 22 | GGTCATCAGCGACTGCTGGCTT | 2075 |
| chr18 | 58335319 | 58335340 | +/− | 22 | GTCATCAGCGACTGCTGGCTTT | 2076 |
| chr18 | 58335320 | 58335341 | +/− | 22 | TCATCAGCGACTGCTGGCTTTG | 2077 |
| chr18 | 58335321 | 58335342 | +/− | 22 | CATCAGCGACTGCTGGCTTTGT | 2078 |
| chr18 | 58335322 | 58335343 | +/− | 22 | ATCAGCGACTGCTGGCTTTGTC | 2079 |
| chr18 | 58335323 | 58335344 | +/− | 22 | TCAGCGACTGCTGGCTTTGTCT | 2080 |
| chr18 | 58335324 | 58335345 | +/− | 22 | CAGCGACTGCTGGCTTTGTCTG | 2081 |
| chr18 | 58335325 | 58335346 | +/− | 22 | AGCGACTGCTGGCTTTGTCTGG | 2082 |
| chr18 | 58335326 | 58335347 | +/− | 22 | GCGACTGCTGGCTTTGTCTGGA | 2083 |
| chr18 | 58335327 | 58335348 | +/− | 22 | CGACTGCTGGCTTTGTCTGGAT | 2084 |
| chr18 | 58335328 | 58335349 | +/− | 22 | GACTGCTGGCTTTGTCTGGATA | 2085 |
| chr18 | 58335329 | 58335350 | +/− | 22 | ACTGCTGGCTTTGTCTGGATAG | 2086 |
| chr18 | 58335330 | 58335351 | +/− | 22 | CTGCTGGCTTTGTCTGGATAGG | 2087 |
| chr18 | 58335331 | 58335352 | +/− | 22 | TGCTGGCTTTGTCTGGATAGGG | 2088 |
| chr18 | 58335332 | 58335353 | +/− | 22 | GCTGGCTTTGTCTGGATAGGGT | 2089 |
| chr18 | 58335333 | 58335354 | +/− | 22 | CTGGCTTTGTCTGGATAGGGTG | 2090 |
| chr18 | 58335334 | 58335355 | +/− | 22 | TGGCTTTGTCTGGATAGGGTGG | 2091 |
| chr18 | 58335335 | 58335356 | +/− | 22 | GGCTTTGTCTGGATAGGGTGGG | 2092 |
| chr18 | 58335336 | 58335357 | +/− | 22 | GCTTTGTCTGGATAGGGTGGGT | 2093 |
| chr18 | 58335337 | 58335358 | +/− | 22 | CTTTGTCTGGATAGGGTGGGTT | 2094 |
| chr18 | 58335338 | 58335359 | +/− | 22 | TTTGTCTGGATAGGGTGGGTTT | 2095 |
| chr18 | 58335339 | 58335360 | +/− | 22 | TTGTCTGGATAGGGTGGGTTTC | 2096 |
| chr18 | 58335340 | 58335361 | +/− | 22 | TGTCTGGATAGGGTGGGTTTCA | 2097 |
| chr18 | 58335341 | 58335362 | +/− | 22 | GTCTGGATAGGGTGGGTTTCAG | 2098 |
| chr18 | 58335342 | 58335363 | +/− | 22 | TCTGGATAGGGTGGGTTTCAGG | 2099 |
| chr18 | 58335343 | 58335364 | +/− | 22 | CTGGATAGGGTGGGTTTCAGGG | 2100 |
| chr18 | 58335344 | 58335365 | +/− | 22 | TGGATAGGGTGGGTTTCAGGGA | 2101 |
| chr18 | 58335345 | 58335366 | +/− | 22 | GGATAGGGTGGGTTTCAGGGAT | 2102 |
| chr18 | 58335346 | 58335367 | +/− | 22 | GATAGGGTGGGTTTCAGGGATT | 2103 |
| chr18 | 58335347 | 58335368 | +/− | 22 | ATAGGGTGGGTTTCAGGGATTC | 2104 |
| chr18 | 58335348 | 58335369 | +/− | 22 | TAGGGTGGGTTTCAGGGATTCT | 2105 |
| chr18 | 58335349 | 58335370 | +/− | 22 | AGGGTGGGTTTCAGGGATTCTG | 2106 |
| chr18 | 58335350 | 58335371 | +/− | 22 | GGGTGGGTTTCAGGGATTCTGA | 2107 |
| chr18 | 58335351 | 58335372 | +/− | 22 | GGTGGGTTTCAGGGATTCTGAT | 2108 |
| chr18 | 58335352 | 58335373 | +/− | 22 | GTGGGTTTCAGGGATTCTGATC | 2109 |
| chr18 | 58335353 | 58335374 | +/− | 22 | TGGGTTTCAGGGATTCTGATCT | 2110 |
| chr18 | 58335354 | 58335375 | +/− | 22 | GGGTTTCAGGGATTCTGATCTC | 2111 |
| chr18 | 58335355 | 58335376 | +/− | 22 | GGTTTCAGGGATTCTGATCTCA | 2112 |
| chr18 | 58335356 | 58335377 | +/− | 22 | GTTTCAGGGATTCTGATCTCAC | 2113 |
| chr18 | 58335357 | 58335378 | +/− | 22 | TTTCAGGGATTCTGATCTCACG | 2114 |
| chr18 | 58335358 | 58335379 | +/− | 22 | TTCAGGGATTCTGATCTCACGT | 2115 |
| chr18 | 58335359 | 58335380 | +/− | 22 | TCAGGGATTCTGATCTCACGTC | 2116 |
| chr18 | 58335360 | 58335381 | +/− | 22 | CAGGGATTCTGATCTCACGTCA | 2117 |
| chr18 | 58335361 | 58335382 | +/− | 22 | AGGGATTCTGATCTCACGTCAC | 2118 |
| chr18 | 58335362 | 58335383 | +/− | 22 | GGGATTCTGATCTCACGTCACC | 2119 |
| chr18 | 58335363 | 58335384 | +/− | 22 | GGATTCTGATCTCACGTCACCT | 2120 |
| chr18 | 58335364 | 58335385 | +/− | 22 | GATTCTGATCTCACGTCACCTG | 2121 |
| chr18 | 58335365 | 58335386 | +/− | 22 | ATTCTGATCTCACGTCACCTGC | 2122 |
| chr18 | 58335366 | 58335387 | +/− | 22 | TTCTGATCTCACGTCACCTGCC | 2123 |
| chr18 | 58335367 | 58335388 | +/− | 22 | TCTGATCTCACGTCACCTGCCT | 2124 |
| chr18 | 58335368 | 58335389 | +/− | 22 | CTGATCTCACGTCACCTGCCTT | 2125 |
| chr18 | 58335369 | 58335390 | +/− | 22 | TGATCTCACGTCACCTGCCTTA | 2126 |
| chr18 | 58335370 | 58335391 | +/− | 22 | GATCTCACGTCACCTGCCTTAC | 2127 |
| chr18 | 58335371 | 58335392 | +/− | 22 | ATCTCACGTCACCTGCCTTACA | 2128 |
| chr18 | 58335372 | 58335393 | +/− | 22 | TCTCACGTCACCTGCCTTACAG | 2129 |
| chr18 | 58335373 | 58335394 | +/− | 22 | CTCACGTCACCTGCCTTACAGC | 2130 |
| chr18 | 58335374 | 58335395 | +/− | 22 | TCACGTCACCTGCCTTACAGCG | 2131 |
| chr18 | 58335375 | 58335396 | +/− | 22 | CACGTCACCTGCCTTACAGCGC | 2132 |
| chr18 | 58335376 | 58335397 | +/− | 22 | ACGTCACCTGCCTTACAGCGCT | 2133 |
| chr18 | 58335377 | 58335398 | +/− | 22 | CGTCACCTGCCTTACAGCGCTG | 2134 |
| chr18 | 58335378 | 58335399 | +/− | 22 | GTCACCTGCCTTACAGCGCTGC | 2135 |
| chr18 | 58335379 | 58335400 | +/− | 22 | TCACCTGCCTTACAGCGCTGCC | 2136 |
| chr18 | 58335380 | 58335401 | +/− | 22 | CACCTGCCTTACAGCGCTGCCA | 2137 |
| chr18 | 58335381 | 58335402 | +/− | 22 | ACCTGCCTTACAGCGCTGCCAC | 2138 |
| chr18 | 58335382 | 58335403 | +/− | 22 | CCTGCCTTACAGCGCTGCCACA | 2139 |
| chr18 | 58335383 | 58335404 | +/− | 22 | CTGCCTTACAGCGCTGCCACAG | 2140 |
| chr18 | 58335384 | 58335405 | +/− | 22 | TGCCTTACAGCGCTGCCACAGC | 2141 |
| chr18 | 58335385 | 58335406 | +/− | 22 | GCCTTACAGCGCTGCCACAGCA | 2142 |
| chr18 | 58335386 | 58335407 | +/− | 22 | CCTTACAGCGCTGCCACAGCAG | 2143 |
| chr18 | 58335387 | 58335408 | +/− | 22 | CTTACAGCGCTGCCACAGCAGT | 2144 |
| chr18 | 58335388 | 58335409 | +/− | 22 | TTACAGCGCTGCCACAGCAGTG | 2145 |
| chr18 | 58335389 | 58335410 | +/− | 22 | TACAGCGCTGCCACAGCAGTGG | 2146 |
| chr18 | 58335390 | 58335411 | +/− | 22 | ACAGCGCTGCCACAGCAGTGGG | 2147 |
| chr18 | 58335391 | 58335412 | +/− | 22 | CAGCGCTGCCACAGCAGTGGGC | 2148 |
| chr18 | 58335392 | 58335413 | +/− | 22 | AGCGCTGCCACAGCAGTGGGCC | 2149 |
| chr18 | 58335393 | 58335414 | +/− | 22 | GCGCTGCCACAGCAGTGGGCCC | 2150 |
| chr18 | 58335394 | 58335415 | +/− | 22 | CGCTGCCACAGCAGTGGGCCCT | 2151 |
| chr18 | 58335395 | 58335416 | +/− | 22 | GCTGCCACAGCAGTGGGCCCTG | 2152 |
| chr18 | 58335396 | 58335417 | +/− | 22 | CTGCCACAGCAGTGGGCCCTGA | 2153 |
| chr18 | 58335397 | 58335418 | +/− | 22 | TGCCACAGCAGTGGGCCCTGAT | 2154 |
| chr18 | 58335398 | 58335419 | +/− | 22 | GCCACAGCAGTGGGCCCTGATT | 2155 |
| chr18 | 58335399 | 58335420 | +/− | 22 | CCACAGCAGTGGGCCCTGATTC | 2156 |
| chr18 | 58335400 | 58335421 | +/− | 22 | CACAGCAGTGGGCCCTGATTCA | 2157 |
| chr18 | 58335401 | 58335422 | +/− | 22 | ACAGCAGTGGGCCCTGATTCAG | 2158 |
| chr18 | 58335402 | 58335423 | +/− | 22 | CAGCAGTGGGCCCTGATTCAGA | 2159 |
| chr18 | 58335403 | 58335424 | +/− | 22 | AGCAGTGGGCCCTGATTCAGAC | 2160 |
| chr18 | 58335404 | 58335425 | +/− | 22 | GCAGTGGGCCCTGATTCAGACA | 2161 |
| chr18 | 58335405 | 58335426 | +/− | 22 | CAGTGGGCCCTGATTCAGACAG | 2162 |
| chr18 | 58335406 | 58335427 | +/− | 22 | AGTGGGCCCTGATTCAGACAGC | 2163 |
| chr18 | 58335407 | 58335428 | +/− | 22 | GTGGGCCCTGATTCAGACAGCA | 2164 |
| chr18 | 58335408 | 58335429 | +/− | 22 | TGGGCCCTGATTCAGACAGCAG | 2165 |
| chr18 | 58335409 | 58335430 | +/− | 22 | GGGCCCTGATTCAGACAGCAGG | 2166 |
| chr18 | 58335317 | 58335338 | +/− | 22 | TGGTCATCAGCGACTGCTGGCT | 2167 |
| chr18 | 58335410 | 58335431 | +/− | 22 | GGCCCTGATTCAGACAGCAGGG | 2168 |
| chr18 | 58335411 | 58335432 | +/− | 22 | GCCCTGATTCAGACAGCAGGGG | 2169 |
| chr18 | 58335412 | 58335433 | +/− | 22 | CCCTGATTCAGACAGCAGGGGG | 2170 |
| chr18 | 58335413 | 58335434 | +/− | 22 | CCTGATTCAGACAGCAGGGGGT | 2171 |
| chr18 | 58335414 | 58335435 | +/− | 22 | CTGATTCAGACAGCAGGGGGTC | 2172 |
| chr18 | 58335415 | 58335436 | +/− | 22 | TGATTCAGACAGCAGGGGGTCA | 2173 |
| chr18 | 58335416 | 58335437 | +/− | 22 | GATTCAGACAGCAGGGGGTCAT | 2174 |
| chr18 | 58335417 | 58335438 | +/− | 22 | ATTCAGACAGCAGGGGGTCATC | 2175 |
| chr18 | 58335418 | 58335439 | +/− | 22 | TTCAGACAGCAGGGGGTCATCC | 2176 |
| chr18 | 58335419 | 58335440 | +/− | 22 | TCAGACAGCAGGGGGTCATCCC | 2177 |
| chr18 | 58335420 | 58335441 | +/− | 22 | CAGACAGCAGGGGGTCATCCCC | 2178 |
| chr18 | 58335421 | 58335442 | +/− | 22 | AGACAGCAGGGGGTCATCCCCT | 2179 |
| chr18 | 58335422 | 58335443 | +/− | 22 | GACAGCAGGGGGTCATCCCCTA | 2180 |
| chr18 | 58335423 | 58335444 | +/− | 22 | ACAGCAGGGGGTCATCCCCTAA | 2181 |
| chr18 | 58335424 | 58335445 | +/− | 22 | CAGCAGGGGGTCATCCCCTAAG | 2182 |
| chr18 | 58335425 | 58335446 | +/− | 22 | AGCAGGGGGTCATCCCCTAAGT | 2183 |
| chr18 | 58335426 | 58335447 | +/− | 22 | GCAGGGGGTCATCCCCTAAGTG | 2184 |

[0102] Also provided herein are some additional target-specific ASOs (Tables 16-33) which may be used methods and/or systems of the present disclosure. The ASOs may be used to induce an isoform switch or modulate (e.g., inhibit or enhance) the biological activity of a specific isoform of one or several of the genes described above or elsewhere herein (e.g., genes comprising one or more of NEDD4L (ENV2), MAP3K7 (ENV3), NFYA (ENV11), ESYT2 (ENV21), MARK2 (ENV18), ST7 (ENV19), ARVCF (ENV22), SYTL2 (ENV17), R3HDM1 (ENV23), COL4A3BP (ENV9), TANGO2 (ENV6), SEPT9 (ENV15), ROBO1 (ENV4), FAM122B (ENV5), CD47 (ENV13), LSR (ENV20), PBX1 (ENV 16), EPB41 (ENV14), ADAM15 (ENV7),EPB41L1 (ENV8), ABI1 (ENV10), FLNB (ENV1), CTNND1 (ENV12), GPR160 (ENV24), ITGB3BP (ENV25), INCENP (ENV26), DENND1B (ENV27), CA12 (ENV28)).

[0103] As discussed above, oligonucleotide sequences comprised in a table may be specific for a single target, or for more than one target. In some cases, oligonucleotide sequences comprised in more than one tables are specific for a single target. For example, oligonucleotide sequences comprised in Tables 16-33 may each be specific for a single target. The targets may be the same as or differ from the target(s) which the oligonucleotide sequences comprised in Tables 2-15 are specific for. The target(s) may be one or more genes described above or elsewhere herein. In some cases, ASOs included in Table 16 are specific for NEDD4L (ENV2). In some cases, ASOs included in Table 17 are specific for MAP3K7 (ENV3). In some cases, ASOs included in Table 18 are specific for ROBO1 (ENV4). In some cases, ASOs included in Table 19 are specific for FAM122B (ENVS). In some cases, ASOs included in Table 20 are specific for TANGO2 (ENV6). In some cases, ASOs included in Table 21 are specific for ADAM15 (ENV7). In some cases, ASOs included in Table 22 are specific for EPB41L1 (ENV8). In some cases, ASOs included in Table 23 are specific for COL4A3BP (ENV9). In some cases, ASOs included in Table 23 are specific for ABI1 (ENV10). In some cases, ASOs included in Table 24 are specific for NFYA (ENV11). In some cases, AS Os included in Table 26 are specific for CTNND1 (ENV12). In some cases, ASOs included in Table 27 are specific for SEPT9 (ENV15). In some cases, ASOs included in Table 28 are specific for SYTL2 (ENV17). In some cases, ASOs included in Table 29 are specific for MARK2 (ENV18). In some cases, ASOs included in Table 30 are specific for ST7 (ENV19). In some cases, ASOs included in Table 31 are specific for ESYT2 (ENV21). In some cases, ASOs included in Table 32 are specific for ARVCF (ENV22). In some cases, ASOs included in Table 33 are specific for R3HDM1 (ENV23).

Lengthy table referenced here
US20220112497A1-20220414-T00001
Please refer to the end of the specification for access instructions.

Lengthy table referenced here
US20220112497A1-20220414-T00002
Please refer to the end of the specification for access instructions.

Lengthy table referenced here
US20220112497A1-20220414-T00003
Please refer to the end of the specification for access instructions.

Lengthy table referenced here
US20220112497A1-20220414-T00004
Please refer to the end of the specification for access instructions.

Lengthy table referenced here
US20220112497A1-20220414-T00005
Please refer to the end of the specification for access instructions.

Lengthy table referenced here
US20220112497A1-20220414-T00006
Please refer to the end of the specification for access instructions.

Lengthy table referenced here
US20220112497A1-20220414-T00007
Please refer to the end of the specification for access instructions.

Lengthy table referenced here
US20220112497A1-20220414-T00008
Please refer to the end of the specification for access instructions.

Lengthy table referenced here
US20220112497A1-20220414-T00009
Please refer to the end of the specification for access instructions.

Lengthy table referenced here
US20220112497A1-20220414-T00010
Please refer to the end of the specification for access instructions.

Lengthy table referenced here
US20220112497A1-20220414-T00011
Please refer to the end of the specification for access instructions.

Lengthy table referenced here
US20220112497A1-20220414-T00012
Please refer to the end of the specification for access instructions.

Lengthy table referenced here
US20220112497A1-20220414-T00013
Please refer to the end of the specification for access instructions.

Lengthy table referenced here
US20220112497A1-20220414-T00014
Please refer to the end of the specification for access instructions.

Lengthy table referenced here
US20220112497A1-20220414-T00015
Please refer to the end of the specification for access instructions.

Lengthy table referenced here
US20220112497A1-20220414-T00016
Please refer to the end of the specification for access instructions.

Lengthy table referenced here
US20220112497A1-20220414-T00017
Please refer to the end of the specification for access instructions.

Lengthy table referenced here
US20220112497A1-20220414-T00018
Please refer to the end of the specification for access instructions.

[0104] While preferred embodiments of the present invention have been shown and described herein, it will be obvious to those skilled in the art that such embodiments are provided by way of example only. It is not intended that the invention be limited by the specific examples provided within the specification. While the invention has been described with reference to the aforementioned specification, the descriptions and illustrations of the embodiments herein are not meant to be construed in a limiting sense. Numerous variations, changes, and substitutions will now occur to those skilled in the art without departing from the invention. Furthermore, it shall be understood that all aspects of the invention are not limited to the specific depictions, configurations or relative proportions set forth herein which depend upon a variety of conditions and variables. It should be understood that various alternatives to the embodiments of the invention described herein may be employed in practicing the invention. It is therefore contemplated that the invention shall also cover any such alternatives, modifications, variations or equivalents. It is intended that the following claims define the scope of the invention and that methods and structures within the scope of these claims and their equivalents be covered thereby.

LENGTHY TABLES
The patent application contains a lengthy table section. A copy of the table is available in electronic form from the USPTO web site (https://seqdata.uspto.gov/?pageRequest=docDetail&DocID=US20220112497A1). An electronic copy of the table will also be available from the USPTO upon request and payment of the fee set forth in 37 CFR 1.19(b)(3).

1.-155. (canceled)

156. An antisense oligonucleotide comprising a sequence selected from the group consisting of:
(SEQ ID NO: 1)
5′-GTGGGTTTCAGGGATTCTGA-3′,
(SEQ ID NO: 2)
5′-CCCTGATTCAGACAGCAGGG-3′,
(SEQ ID NO: 3)
5′-GCTGGCTTTGTCTGGATAGG-3′,
(SEQ ID NO: 4)
5′-TCTCACGTCACCTGCCTTAC-3′,
and
(SEQ ID NO: 5)
5′-AGCGCTGCCACAGCAGTGGG-3′,
or a complement thereof.

157. The antisense oligonucleotide of claim 156, wherein the oligonucleotide is capable of modulating splicing of NEDD4L mRNA in a cell.

158. The antisense oligonucleotide of claim 157, wherein the modulation of splicing comprises promoting a splicing switch.

159. The antisense oligonucleotide of claim 156, wherein said oligonucleotide comprises 20-50 nucleotides.

160. The antisense oligonucleotide of claim 159, wherein said oligonucleotide comprises 25-30 nucleotides.

161. The antisense oligonucleotide of claim 156, wherein said oligonucleotide comprises deoxyribonucleic acid (DNA), ribonucleic acid (RNA), PNA, or a combination or hybrid thereof.

162. The antisense compound of claim 156, wherein the oligonucleotide comprises one or more modified oligonucleotides.

163. The antisense oligonucleotide of claim 156, wherein the antisense oligonucleotide comprises at least one modified internucleoside linkage.

164. The antisense oligonucleotide of claim 163, wherein all internucleoside linkages are modified.

165. The antisense oligonucleotide of claim 163, wherein the modified internucleoside linkage comprises a phosphorothioate linkage.

166. The antisense oligonucleotide of claim 156, wherein the antisense oligonucleotide comprises one or more modified nucleoside selected from the group consisting of 2′-O-methoxyethyl nucleoside, 2′-fluoro nucleoside, 2′-dimethylaminooxyethoxy nucleoside, T-dimethylaminoethoxyethoxy nucleoside, 2′-guanidinium nucleoside, 2′-O-guanidinium ethyl nucleoside, T-carbamate nucleoside, 2′aminooxy nucleoside, T-acetamido nucleoside, and locked nucleic acid.

167. A pharmaceutically acceptable composition comprising an antisense oligonucleotide according to claim 156, and a pharmaceutically acceptable diluent or carrier.

168. A method of treating cancer in a patient in need thereof, comprising: administering to the patient a therapeutically effective amount of the pharmaceutical composition of claim 167, wherein the antisense oligonucleotide binds to a segment of a pre-mRNA which is encoded by NEDD4L and modulates splicing in the pre-mRNA.

169. The method of claim 168, wherein the cancer comprises lung cancer, kidney cancer, or breast cancer.

170. The method of claim 168, wherein the breast cancer is triple-negative breast cancer.

171. A method of modulating splicing of a NEDD4L pre-mRNA in a cell comprising: contacting the cell with an antisense compound selected from the group consisting of:
(SEQ ID NO: 1)
5′-GTGGGTTTCAGGGATTCTGA-3′,
(SEQ ID NO: 2)
5′-CCCTGATTCAGACAGCAGGG-3′,
(SEQ ID NO: 3)
5′-GCTGGCTTTGTCTGGATAGG-3′,
(SEQ ID NO: 4)
5′-TCTCACGTCACCTGCCTTAC-3′,
and
(SEQ ID NO: 5)
5′-AGCGCTGCCACAGCAGTGGG-3′,
or a complement thereof;
thereby modulating splicing in the NEDD4L pre-mRNA of the cell.

172. The method of claim 171, wherein the modulation of splicing comprises promoting a splicing switch in said pre-mRNA.

173. The method of claim 171, wherein the modulation of splicing comprises promoting inclusion of an exon in a pre-mRNA isoform.

174. A method of treating a patient having a cancer showing disease-specific splicing events of the pre-mRNA encoded by the NEDD4L gene resulting in a short pre-mRNA isoform, comprising:
contacting the cell of the patient with an ASO, wherein the ASO binds to a segment of the pre-mRNA and modulates splicing of the pre-mRNA from the short isoform to a long isoform, thereby treating the cancer.

175. The method of claim 174, wherein the ASO promotes inclusion of an excluded middle exon of an identified exon trio in the pre-mRNA.

The application's sequence listing, which the Patent Office published only in electronic form, follows.

SEQUENCE LISTING (5497 sequences)

SEQ ID NO: 1 - DNA, 20 bp, Artificial Sequence
  Description of Artificial Sequence: Synthetic oligonucleotide
gtgggtttcagggattctga

SEQ ID NO: 2 - DNA, 20 bp, Artificial Sequence
  Description of Artificial Sequence: Synthetic oligonucleotide
ccctgattcagacagcaggg

SEQ ID NO: 3 - DNA, 20 bp, Artificial Sequence
  Description of Artificial Sequence: Synthetic oligonucleotide
gctggctttgtctggatagg

SEQ ID NO: 4 - DNA, 20 bp, Artificial Sequence
  Description of Artificial Sequence: Synthetic oligonucleotide
tctcacgtcacctgccttac

SEQ ID NO: 5 - DNA, 20 bp, Artificial Sequence
  Description of Artificial Sequence: Synthetic oligonucleotide
agcgctgccacagcagtggg

SEQ ID NO: 6 - DNA, 16 bp, Artificial Sequence
  Description of Artificial Sequence: Synthetic oligonucleotide
cccaactaatctccat

SEQ ID NO: 7 - DNA, 16 bp, Artificial Sequence
  Description of Artificial Sequence: Synthetic oligonucleotide
ccaactaatctccatt

SEQ ID NO: 8 - DNA, 16 bp, Artificial Sequence
  Description of Artificial Sequence: Synthetic oligonucleotide
caactaatctccattt

SEQ ID NO: 9 - DNA, 16 bp, Artificial Sequence
  Description of Artificial Sequence: Synthetic oligonucleotide
aactaatctccatttg

SEQ ID NO: 10 - DNA, 16 bp, Artificial Sequence
  Description of Artificial Sequence: Synthetic oligonucleotide
actaatctccatttgc

SEQ ID NO: 11 - DNA, 16 bp, Artificial Sequence
  Description of Artificial Sequence: Synthetic oligonucleotide
ctaatctccatttgcc

SEQ ID NO: 12 - DNA, 16 bp, Artificial Sequence
  Description of Artificial Sequence: Synthetic oligonucleotide
taatctccatttgcca

SEQ ID NO: 13 - DNA, 16 bp, Artificial Sequence
  Description of Artificial Sequence: Synthetic oligonucleotide
aatctccatttgccac

SEQ ID NO: 14 - DNA, 16 bp, Artificial Sequence
  Description of Artificial Sequence: Synthetic oligonucleotide
atctccatttgccact

SEQ ID NO: 15 - DNA, 16 bp, Artificial Sequence
  Description of Artificial Sequence: Synthetic oligonucleotide
tctccatttgccactg

SEQ ID NO: 16 - DNA, 16 bp, Artificial Sequence
  Description of Artificial Sequence: Synthetic oligonucleotide
ctccatttgccactga

SEQ ID NO: 17 - DNA, 16 bp, Artificial Sequence
  Description of Artificial Sequence: Synthetic oligonucleotide
tccatttgccactgac

SEQ ID NO: 18 - DNA, 16 bp, Artificial Sequence
  Description of Artificial Sequence: Synthetic oligonucleotide
ccatttgccactgacc

SEQ ID NO: 19 - DNA, 16 bp, Artificial Sequence
  Description of Artificial Sequence: Synthetic oligonucleotide
catttgccactgacca

SEQ ID NO: 20 - DNA, 16 bp, Artificial Sequence
  Description of Artificial Sequence: Synthetic oligonucleotide
atttgccactgaccag

SEQ ID NO: 21 - DNA, 16 bp, Artificial Sequence
  Description of Artificial Sequence: Synthetic oligonucleotide
tttgccactgaccagg

SEQ ID NO: 22 - DNA, 16 bp, Artificial Sequence
  Description of Artificial Sequence: Synthetic oligonucleotide
ttgccactgaccaggc

SEQ ID NO: 23 - DNA, 16 bp, Artificial Sequence
  Description of Artificial Sequence: Synthetic oligonucleotide
tgccactgaccaggcc

SEQ ID NO: 24 - DNA, 16 bp, Artificial Sequence
  Description of Artificial Sequence: Synthetic oligonucleotide
gccactgaccaggcca

SEQ ID NO: 25 - DNA, 16 bp, Artificial Sequence
  Description of Artificial Sequence: Synthetic oligonucleotide
ccactgaccaggccac

SEQ ID NO: 26 - DNA, 16 bp, Artificial Sequence
  Description of Artificial Sequence: Synthetic oligonucleotide
cactgaccaggccaca

SEQ ID NO: 27 - DNA, 16 bp, Artificial Sequence
  Description of Artificial Sequence: Synthetic oligonucleotide
actgaccaggccacag

SEQ ID NO: 28 - DNA, 16 bp, Artificial Sequence
  Description of Artificial Sequence: Synthetic oligonucleotide
ctgaccaggccacaga

SEQ ID NO: 29 - DNA, 16 bp, Artificial Sequence
  Description of Artificial Sequence: Synthetic oligonucleotide
tgaccaggccacagat

SEQ ID NO: 30 - DNA, 16 bp, Artificial Sequence
  Description of Artificial Sequence: Synthetic oligonucleotide
gaccaggccacagatg

SEQ ID NO: 31 - DNA, 16 bp, Artificial Sequence
  Description of Artificial Sequence: Synthetic oligonucleotide
accaggccacagatgg

SEQ ID NO: 32 - DNA, 16 bp, Artificial Sequence
  Description of Artificial Sequence: Synthetic oligonucleotide
ccaggccacagatggg

SEQ ID NO: 33 - DNA, 16 bp, Artificial Sequence
  Description of Artificial Sequence: Synthetic oligonucleotide
caggccacagatgggg

SEQ ID NO: 34 - DNA, 16 bp, Artificial Sequence
  Description of Artificial Sequence: Synthetic oligonucleotide
aggccacagatgggga

SEQ ID NO: 35 - DNA, 16 bp, Artificial Sequence
  Description of Artificial Sequence: Synthetic oligonucleotide
ggccacagatggggaa

SEQ ID NO: 36 - DNA, 16 bp, Artificial Sequence
  Description of Artificial Sequence: Synthetic oligonucleotide
gccacagatggggaag

SEQ ID NO: 37 - DNA, 16 bp, Artificial Sequence
  Description of Artificial Sequence: Synthetic oligonucleotide
ccacagatggggaagt

SEQ ID NO: 38 - DNA, 16 bp, Artificial Sequence
  Description of Artificial Sequence: Synthetic oligonucleotide
cacagatggggaagtc

SEQ ID NO: 39 - DNA, 16 bp, Artificial Sequence
  Description of Artificial Sequence: Synthetic oligonucleotide
acagatggggaagtca

SEQ ID NO: 40 - DNA, 16 bp, Artificial Sequence
  Description of Artificial Sequence: Synthetic oligonucleotide
cagatggggaagtcac

SEQ ID NO: 41 - DNA, 16 bp, Artificial Sequence
  Description of Artificial Sequence: Synthetic oligonucleotide
agatggggaagtcaca

SEQ ID NO: 42 - DNA, 16 bp, Artificial Sequence
  Description of Artificial Sequence: Synthetic oligonucleotide
gatggggaagtcacag

SEQ ID NO: 43 - DNA, 16 bp, Artificial Sequence
  Description of Artificial Sequence: Synthetic oligonucleotide
atggggaagtcacagc

SEQ ID NO: 44 - DNA, 16 bp, Artificial Sequence
  Description of Artificial Sequence: Synthetic oligonucleotide
tggggaagtcacagcc

SEQ ID NO: 45 - DNA, 16 bp, Artificial Sequence
  Description of Artificial Sequence: Synthetic oligonucleotide
ggggaagtcacagccg

SEQ ID NO: 46 - DNA, 16 bp, Artificial Sequence
  Description of Artificial Sequence: Synthetic oligonucleotide
gggaagtcacagccgt

SEQ ID NO: 47 - DNA, 16 bp, Artificial Sequence
  Description of Artificial Sequence: Synthetic oligonucleotide
ggaagtcacagccgtg

SEQ ID NO: 48 - DNA, 16 bp, Artificial Sequence
  Description of Artificial Sequence: Synthetic oligonucleotide
gaagtcacagccgtgg

SEQ ID NO: 49 - DNA, 16 bp, Artificial Sequence
  Description of Artificial Sequence: Synthetic oligonucleotide
aagtcacagccgtgga

SEQ ID NO: 50 - DNA, 16 bp, Artificial Sequence
  Description of Artificial Sequence: Synthetic oligonucleotide
agtcacagccgtggag

SEQ ID NO: 51 - DNA, 16 bp, Artificial Sequence
  Description of Artificial Sequence: Synthetic oligonucleotide
gtcacagccgtggagg

SEQ ID NO: 52 - DNA, 16 bp, Artificial Sequence
  Description of Artificial Sequence: Synthetic oligonucleotide
tcacagccgtggagga

SEQ ID NO: 53 - DNA, 16 bp, Artificial Sequence
  Description of Artificial Sequence: Synthetic oligonucleotide
cacagccgtggaggag

SEQ ID NO: 54 - DNA, 16 bp, Artificial Sequence
  Description of Artificial Sequence: Synthetic oligonucleotide
acagccgtggaggagg

SEQ ID NO: 55 - DNA, 16 bp, Artificial Sequence
  Description of Artificial Sequence: Synthetic oligonucleotide
cagccgtggaggaggc

SEQ ID NO: 56 - DNA, 16 bp, Artificial Sequence
  Description of Artificial Sequence: Synthetic oligonucleotide
agccgtggaggaggca

SEQ ID NO: 57 - DNA, 16 bp, Artificial Sequence
  Description of Artificial Sequence: Synthetic oligonucleotide
gccgtggaggaggcac

SEQ ID NO: 58 - DNA, 16 bp, Artificial Sequence
  Description of Artificial Sequence: Synthetic oligonucleotide
ccgtggaggaggcacc

SEQ ID NO: 59 - DNA, 16 bp, Artificial Sequence
  Description of Artificial Sequence: Synthetic oligonucleotide
cgtggaggaggcaccg

SEQ ID NO: 60 - DNA, 16 bp, Artificial Sequence
  Description of Artificial Sequence: Synthetic oligonucleotide
gtggaggaggcaccgg

SEQ ID NO: 61 - DNA, 16 bp, Artificial Sequence
  Description of Artificial Sequence: Synthetic oligonucleotide
tggaggaggcaccggt

SEQ ID NO: 62 - DNA, 16 bp, Artificial Sequence
  Description of Artificial Sequence: Synthetic oligonucleotide
ggaggaggcaccggta

SEQ ID NO: 63 - DNA, 16 bp, Artificial Sequence
  Description of Artificial Sequence: Synthetic oligonucleotide
gaggaggcaccggtaa

SEQ ID NO: 64 - DNA, 16 bp, Artificial Sequence
  Description of Artificial Sequence: Synthetic oligonucleotide
aggaggcaccggtaaa

SEQ ID NO: 65 - DNA, 16 bp, Artificial Sequence
  Description of Artificial Sequence: Synthetic oligonucleotide
ggaggcaccggtaaat

SEQ ID NO: 66 - DNA, 16 bp, Artificial Sequence
  Description of Artificial Sequence: Synthetic oligonucleotide
gaggcaccggtaaatg

SEQ ID NO: 67 - DNA, 16 bp, Artificial Sequence
  Description of Artificial Sequence: Synthetic oligonucleotide
aggcaccggtaaatgc

SEQ ID NO: 68 - DNA, 16 bp, Artificial Sequence
  Description of Artificial Sequence: Synthetic oligonucleotide
ggcaccggtaaatgca

SEQ ID NO: 69 - DNA, 16 bp, Artificial Sequence
  Description of Artificial Sequence: Synthetic oligonucleotide
gcaccggtaaatgcat

SEQ ID NO: 70 - DNA, 16 bp, Artificial Sequence
  Description of Artificial Sequence: Synthetic oligonucleotide
caccggtaaatgcatg

SEQ ID NO: 71 - DNA, 16 bp, Artificial Sequence
  Description of Artificial Sequence: Synthetic oligonucleotide
accggtaaatgcatgt

SEQ ID NO: 72 - DNA, 16 bp, Artificial Sequence
  Description of Artificial Sequence: Synthetic oligonucleotide
ccggtaaatgcatgtc

SEQ ID NO: 73 - DNA, 16 bp, Artificial Sequence
  Description of Artificial Sequence: Synthetic oligonucleotide
cggtaaatgcatgtcc

SEQ ID NO: 74 - DNA, 16 bp, Artificial Sequence
  Description of Artificial Sequence: Synthetic oligonucleotide
ggtaaatgcatgtccc

SEQ ID NO: 75 - DNA, 16 bp, Artificial Sequence
  Description of Artificial Sequence: Synthetic oligonucleotide
gtaaatgcatgtcccc

SEQ ID NO: 76 - DNA, 16 bp, Artificial Sequence
  Description of Artificial Sequence: Synthetic oligonucleotide
taaatgcatgtccccc

SEQ ID NO: 77 - DNA, 16 bp, Artificial Sequence
  Description of Artificial Sequence: Synthetic oligonucleotide
aaatgcatgtccccct

SEQ ID NO: 78 - DNA, 16 bp, Artificial Sequence
  Description of Artificial Sequence: Synthetic oligonucleotide
aatgcatgtccccctg

SEQ ID NO: 79 - DNA, 16 bp, Artificial Sequence
  Description of Artificial Sequence: Synthetic oligonucleotide
atgcatgtccccctgg

SEQ ID NO: 80 - DNA, 16 bp, Artificial Sequence
  Description of Artificial Sequence: Synthetic oligonucleotide
tgcatgtccccctgga

SEQ ID NO: 81 - DNA, 16 bp, Artificial Sequence
  Description of Artificial Sequence: Synthetic oligonucleotide
gcatgtccccctggat

SEQ ID NO: 82 - DNA, 16 bp, Artificial Sequence
  Description of Artificial Sequence: Synthetic oligonucleotide
catgtccccctggatt

SEQ ID NO: 83 - DNA, 16 bp, Artificial Sequence
  Description of Artificial Sequence: Synthetic oligonucleotide
atgtccccctggattc

SEQ ID NO: 84 - DNA, 16 bp, Artificial Sequence
  Description of Artificial Sequence: Synthetic oligonucleotide
tgtccccctggattca

SEQ ID NO: 85 - DNA, 16 bp, Artificial Sequence
  Description of Artificial Sequence: Synthetic oligonucleotide
gtccccctggattcag

SEQ ID NO: 86 - DNA, 16 bp, Artificial Sequence
  Description of Artificial Sequence: Synthetic oligonucleotide
tccccctggattcagg

SEQ ID NO: 87 - DNA, 16 bp, Artificial Sequence
  Description of Artificial Sequence: Synthetic oligonucleotide
ccccctggattcaggc

SEQ ID NO: 88 - DNA, 16 bp, Artificial Sequence
  Description of Artificial Sequence: Synthetic oligonucleotide
cccctggattcaggcc

SEQ ID NO: 89 - DNA, 16 bp, Artificial Sequence
  Description of Artificial Sequence: Synthetic oligonucleotide
ccctggattcaggccc

SEQ ID NO: 90 - DNA, 16 bp, Artificial Sequence
  Description of Artificial Sequence: Synthetic oligonucleotide
cctggattcaggccct

SEQ ID NO: 91 - DNA, 16 bp, Artificial Sequence
  Description of Artificial Sequence: Synthetic oligonucleotide
ctggattcaggccctg

SEQ ID NO: 92 - DNA, 16 bp, Artificial Sequence
  Description of Artificial Sequence: Synthetic oligonucleotide
tggattcaggccctgg

SEQ ID NO: 93 - DNA, 16 bp, Artificial Sequence
  Description of Artificial Sequence: Synthetic oligonucleotide
ggattcaggccctggg

SEQ ID NO: 94 - DNA, 16 bp, Artificial Sequence
  Description of Artificial Sequence: Synthetic oligonucleotide
gattcaggccctgggt

SEQ ID NO: 95 - DNA, 16 bp, Artificial Sequence
  Description of Artificial Sequence: Synthetic oligonucleotide
attcaggccctgggta

SEQ ID NO: 96 - DNA, 16 bp, Artificial Sequence
  Description of Artificial Sequence: Synthetic oligonucleotide
ttcaggccctgggtac

SEQ ID NO: 97 - DNA, 16 bp, Artificial Sequence
  Description of Artificial Sequence: Synthetic oligonucleotide
tcaggccctgggtaca

SEQ ID NO: 98 - DNA, 16 bp, Artificial Sequence
  Description of Artificial Sequence: Synthetic oligonucleotide
caggccctgggtacaa

SEQ ID NO: 99 - DNA, 16 bp, Artificial Sequence
  Description of Artificial Sequence: Synthetic oligonucleotide
aggccctgggtacaat

SEQ ID NO: 100 - DNA, 16 bp, Artificial Sequence
  Description of Artificial Sequence: Synthetic oligonucleotide
ggccctgggtacaatt

SEQ ID NO: 101 - DNA, 16 bp, Artificial Sequence
  Description of Artificial Sequence: Synthetic oligonucleotide
gccctgggtacaattt

SEQ ID NO: 102 - DNA, 16 bp, Artificial Sequence
  Description of Artificial Sequence: Synthetic oligonucleotide
ccctgggtacaatttt

SEQ ID NO: 103 - DNA, 16 bp, Artificial Sequence
  Description of Artificial Sequence: Synthetic oligonucleotide
cctgggtacaattttg

SEQ ID NO: 104 - DNA, 16 bp, Artificial Sequence
  Description of Artificial Sequence: Synthetic oligonucleotide
ctgggtacaattttgg

SEQ ID NO: 105 - DNA, 16 bp, Artificial Sequence
  Description of Artificial Sequence: Synthetic oligonucleotide
tgggtacaattttggt

SEQ ID NO: 106 - DNA, 16 bp, Artificial Sequence
  Description of Artificial Sequence: Synthetic oligonucleotide
gggtacaattttggtt

SEQ ID NO: 107 - DNA, 16 bp, Artificial Sequence
  Description of Artificial Sequence: Synthetic oligonucleotide
ggtacaattttggttt

SEQ ID NO: 108 - DNA, 16 bp, Artificial Sequence
  Description of Artificial Sequence: Synthetic oligonucleotide
gtacaattttggtttt

SEQ ID NO: 109 - DNA, 16 bp, Artificial Sequence
  Description of Artificial Sequence: Synthetic oligonucleotide
tacaattttggttttt

SEQ ID NO: 110 - DNA, 16 bp, Artificial Sequence
  Description of Artificial Sequence: Synthetic oligonucleotide
acaattttggtttttt

SEQ ID NO: 111 - DNA, 16 bp, Artificial Sequence
  Description of Artificial Sequence: Synthetic oligonucleotide
caattttggttttttc

SEQ ID NO: 112 - DNA, 16 bp, Artificial Sequence
  Description of Artificial Sequence: Synthetic oligonucleotide
aattttggttttttcc

SEQ ID NO: 113 - DNA, 16 bp, Artificial Sequence
  Description of Artificial Sequence: Synthetic oligonucleotide
attttggttttttcct

SEQ ID NO: 114 - DNA, 16 bp, Artificial Sequence
  Description of Artificial Sequence: Synthetic oligonucleotide
ttttggttttttcctt

SEQ ID NO: 115 - DNA, 16 bp, Artificial Sequence
  Description of Artificial Sequence: Synthetic oligonucleotide
tttggttttttccttt

SEQ ID NO: 116 - DNA, 16 bp, Artificial Sequence
  Description of Artificial Sequence: Synthetic oligonucleotide
ttggttttttcctttt

SEQ ID NO: 117 - DNA, 16 bp, Artificial Sequence
  Description of Artificial Sequence: Synthetic oligonucleotide
tggttttttccttttt

SEQ ID NO: 118 - DNA, 16 bp, Artificial Sequence
  Description of Artificial Sequence: Synthetic oligonucleotide
ggttttttcctttttg

SEQ ID NO: 119 - DNA, 16 bp, Artificial Sequence
  Description of Artificial Sequence: Synthetic oligonucleotide
gttttttcctttttgt

SEQ ID NO: 120 - DNA, 16 bp, Artificial Sequence
  Description of Artificial Sequence: Synthetic oligonucleotide
ttttttcctttttgtg

SEQ ID NO: 121 - DNA, 16 bp, Artificial Sequence
  Description of Artificial Sequence: Synthetic oligonucleotide
tttttcctttttgtgt

SEQ ID NO: 122 - DNA, 16 bp, Artificial Sequence
  Description of Artificial Sequence: Synthetic oligonucleotide
ttttcctttttgtgtt

SEQ ID NO: 123 - DNA, 16 bp, Artificial Sequence
  Description of Artificial Sequence: Synthetic oligonucleotide
tttcctttttgtgttt

SEQ ID NO: 124 - DNA, 16 bp, Artificial Sequence
  Description of Artificial Sequence: Synthetic oligonucleotide
ttcctttttgtgtttc

SEQ ID NO: 125 - DNA, 16 bp, Artificial Sequence
  Description of Artificial Sequence: Synthetic oligonucleotide
tcctttttgtgtttct

SEQ ID NO: 126 - DNA, 16 bp, Artificial Sequence
  Description of Artificial Sequence: Synthetic oligonucleotide
cctttttgtgtttctg

SEQ ID NO: 127 - DNA, 16 bp, Artificial Sequence
  Description of Artificial Sequence: Synthetic oligonucleotide
ctttttgtgtttctgt

SEQ ID NO: 128 - DNA, 16 bp, Artificial Sequence
  Description of Artificial Sequence: Synthetic oligonucleotide
tttttgtgtttctgtg

SEQ ID NO: 129 - DNA, 16 bp, Artificial Sequence
  Description of Artificial Sequence: Synthetic oligonucleotide
ttttgtgtttctgtgt

SEQ ID NO: 130 - DNA, 16 bp, Artificial Sequence
  Description of Artificial Sequence: Synthetic oligonucleotide
tttgtgtttctgtgtt

SEQ ID NO: 131 - DNA, 16 bp, Artificial Sequence
  Description of Artificial Sequence: Synthetic oligonucleotide
ttgtgtttctgtgttt

SEQ ID NO: 132 - DNA, 16 bp, Artificial Sequence
  Description of Artificial Sequence: Synthetic oligonucleotide
tgtgtttctgtgttta

SEQ ID NO: 133 - DNA, 16 bp, Artificial Sequence
  Description of Artificial Sequence: Synthetic oligonucleotide
gtgtttctgtgtttac

SEQ ID NO: 134 - DNA, 16 bp, Artificial Sequence
  Description of Artificial Sequence: Synthetic oligonucleotide
tgtttctgtgtttact

SEQ ID NO: 135 - DNA, 16 bp, Artificial Sequence
  Description of Artificial Sequence: Synthetic oligonucleotide
gtttctgtgtttactc

SEQ ID NO: 136 - DNA, 16 bp, Artificial Sequence
  Description of Artificial Sequence: Synthetic oligonucleotide
tttctgtgtttactca

SEQ ID NO: 137 - DNA, 16 bp, Artificial Sequence
  Description of Artificial Sequence: Synthetic oligonucleotide
ttctgtgtttactcag

SEQ ID NO: 138 - DNA, 16 bp, Artificial Sequence
  Description of Artificial Sequence: Synthetic oligonucleotide
tctgtgtttactcagc

SEQ ID NO: 139 - DNA, 16 bp, Artificial Sequence
  Description of Artificial Sequence: Synthetic oligonucleotide
ctgtgtttactcagcc

SEQ ID NO: 140 - DNA, 16 bp, Artificial Sequence
  Description of Artificial Sequence: Synthetic oligonucleotide
tgtgtttactcagcct

SEQ ID NO: 141 - DNA, 16 bp, Artificial Sequence
  Description of Artificial Sequence: Synthetic oligonucleotide
gtgtttactcagcctt

SEQ ID NO: 142 - DNA, 16 bp, Artificial Sequence
  Description of Artificial Sequence: Synthetic oligonucleotide
tgtttactcagccttc

SEQ ID NO: 143 - DNA, 16 bp, Artificial Sequence
  Description of Artificial Sequence: Synthetic oligonucleotide
gtttactcagccttca

SEQ ID NO: 144 - DNA, 16 bp, Artificial Sequence
  Description of Artificial Sequence: Synthetic oligonucleotide
tttactcagccttcat

SEQ ID NO: 145 - DNA, 16 bp, Artificial Sequence
  Description of Artificial Sequence: Synthetic oligonucleotide
ttactcagccttcatt

SEQ ID NO: 146 - DNA, 16 bp, Artificial Sequence
  Description of Artificial Sequence: Synthetic oligonucleotide
tactcagccttcattt

SEQ ID NO: 147 - DNA, 16 bp, Artificial Sequence
  Description of Artificial Sequence: Synthetic oligonucleotide
actcagccttcatttc

SEQ ID NO: 148 - DNA, 16 bp, Artificial Sequence
  Description of Artificial Sequence: Synthetic oligonucleotide
ctcagccttcatttca

SEQ ID NO: 149 - DNA, 16 bp, Artificial Sequence
  Description of Artificial Sequence: Synthetic oligonucleotide
tcagccttcatttcag

SEQ ID NO: 150 - DNA, 16 bp, Artificial Sequence
  Description of Artificial Sequence: Synthetic oligonucleotide
cagccttcatttcaga

SEQ ID NO: 151 - DNA, 16 bp, Artificial Sequence
  Description of Artificial Sequence: Synthetic oligonucleotide
agccttcatttcagaa

SEQ ID NO: 152 - DNA, 16 bp, Artificial Sequence
  Description of Artificial Sequence: Synthetic oligonucleotide
gccttcatttcagaaa

SEQ ID NO: 153 - DNA, 16 bp, Artificial Sequence
  Description of Artificial Sequence: Synthetic oligonucleotide
ccttcatttcagaaaa

SEQ ID NO: 154 - DNA, 16 bp, Artificial Sequence
  Description of Artificial Sequence: Synthetic oligonucleotide
cttcatttcagaaaat

SEQ ID NO: 155 - DNA, 16 bp, Artificial Sequence
  Description of Artificial Sequence: Synthetic oligonucleotide
ttcatttcagaaaatc

SEQ ID NO: 156 - DNA, 16 bp, Artificial Sequence
  Description of Artificial Sequence: Synthetic oligonucleotide
tcatttcagaaaatct

SEQ ID NO: 157 - DNA, 16 bp, Artificial Sequence
  Description of Artificial Sequence: Synthetic oligonucleotide
catttcagaaaatctg

SEQ ID NO: 158 - DNA, 16 bp, Artificial Sequence
  Description of Artificial Sequence: Synthetic oligonucleotide
atttcagaaaatctgc

SEQ ID NO: 159 - DNA, 16 bp, Artificial Sequence
  Description of Artificial Sequence: Synthetic oligonucleotide
tttcagaaaatctgcc

SEQ ID NO: 160 - DNA, 16 bp, Artificial Sequence
  Description of Artificial Sequence: Synthetic oligonucleotide
ttcagaaaatctgcca

SEQ ID NO: 161 - DNA, 16 bp, Artificial Sequence
  Description of Artificial Sequence: Synthetic oligonucleotide
tcagaaaatctgccat

SEQ ID NO: 162 - DNA, 16 bp, Artificial Sequence
  Description of Artificial Sequence: Synthetic oligonucleotide
cagaaaatctgccatc

SEQ ID NO: 163 - DNA, 16 bp, Artificial Sequence
  Description of Artificial Sequence: Synthetic oligonucleotide
agaaaatctgccatct

SEQ ID NO: 164 - DNA, 16 bp, Artificial Sequence
  Description of Artificial Sequence: Synthetic oligonucleotide
gaaaatctgccatctg

SEQ ID NO: 165 - DNA, 16 bp, Artificial Sequence
  Description of Artificial Sequence: Synthetic oligonucleotide
aaaatctgccatctgc

SEQ ID NO: 166 - DNA, 16 bp, Artificial Sequence
  Description of Artificial Sequence: Synthetic oligonucleotide
aaatctgccatctgct

SEQ ID NO: 167 - DNA, 16 bp, Artificial Sequence
  Description of Artificial Sequence: Synthetic oligonucleotide
aatctgccatctgctt

SEQ ID NO: 168 - DNA, 16 bp, Artificial Sequence
  Description of Artificial Sequence: Synthetic oligonucleotide
atctgccatctgcttc

SEQ ID NO: 169 - DNA, 16 bp, Artificial Sequence
  Description of Artificial Sequence: Synthetic oligonucleotide
tctgccatctgcttct

SEQ ID NO: 170 - DNA, 16 bp, Artificial Sequence
  Description of Artificial Sequence: Synthetic oligonucleotide
ctgccatctgcttctg

SEQ ID NO: 171 - DNA, 16 bp, Artificial Sequence
  Description of Artificial Sequence: Synthetic oligonucleotide
tgccatctgcttctgg

SEQ ID NO: 172 - DNA, 16 bp, Artificial Sequence
  Description of Artificial Sequence: Synthetic oligonucleotide
gccatctgcttctggg

SEQ ID NO: 173 - DNA, 16 bp, Artificial Sequence
  Description of Artificial Sequence: Synthetic oligonucleotide
ccatctgcttctggga

SEQ ID NO: 174 - DNA, 16 bp, Artificial Sequence
  Description of Artificial Sequence: Synthetic oligonucleotide
catctgcttctgggat

SEQ ID NO: 175 - DNA, 16 bp, Artificial Sequence
  Description of Artificial Sequence: Synthetic oligonucleotide
atctgcttctgggatt

SEQ ID NO: 176 - DNA, 16 bp, Artificial Sequence
  Description of Artificial Sequence: Synthetic oligonucleotide
tctgcttctgggattg

SEQ ID NO: 177 - DNA, 16 bp, Artificial Sequence
  Description of Artificial Sequence: Synthetic oligonucleotide
ctgcttctgggattgc

SEQ ID NO: 178 - DNA, 16 bp, Artificial Sequence
  Description of Artificial Sequence: Synthetic oligonucleotide
tgcttctgggattgct

SEQ ID NO: 179 - DNA, 16 bp, Artificial Sequence
  Description of Artificial Sequence: Synthetic oligonucleotide
gcttctgggattgctt

SEQ ID NO: 180 - DNA, 16 bp, Artificial Sequence
  Description of Artificial Sequence: Synthetic oligonucleotide
cttctgggattgctta

SEQ ID NO: 181 - DNA, 16 bp, Artificial Sequence
  Description of Artificial Sequence: Synthetic oligonucleotide
ttctgggattgcttaa

SEQ ID NO: 182 - DNA, 16 bp, Artificial Sequence
  Description of Artificial Sequence: Synthetic oligonucleotide
tctgggattgcttaag

SEQ ID NO: 183 - DNA, 16 bp, Artificial Sequence
  Description of Artificial Sequence: Synthetic oligonucleotide
ctgggattgcttaagc

SEQ ID NO: 184 - DNA, 16 bp, Artificial Sequence
  Description of Artificial Sequence: Synthetic oligonucleotide
tgggattgcttaagcc

SEQ ID NO: 185 - DNA, 16 bp, Artificial Sequence
  Description of Artificial Sequence: Synthetic oligonucleotide
gggattgcttaagccc

SEQ ID NO: 186 - DNA, 16 bp, Artificial Sequence
  Description of Artificial Sequence: Synthetic oligonucleotide
ggattgcttaagccct

SEQ ID NO: 187 - DNA, 16 bp, Artificial Sequence
  Description of Artificial Sequence: Synthetic oligonucleotide
gattgcttaagccctg

SEQ ID NO: 188 - DNA, 16 bp, Artificial Sequence
  Description of Artificial Sequence: Synthetic oligonucleotide
attgcttaagccctgt

SEQ ID NO: 189 - DNA, 16 bp, Artificial Sequence
  Description of Artificial Sequence: Synthetic oligonucleotide
ttgcttaagccctgtg

SEQ ID NO: 190 - DNA, 16 bp, Artificial Sequence
  Description of Artificial Sequence: Synthetic oligonucleotide
tgcttaagccctgtgg

SEQ ID NO: 191 - DNA, 16 bp, Artificial Sequence
  Description of Artificial Sequence: Synthetic oligonucleotide
gcttaagccctgtggg

SEQ ID NO: 192 - DNA, 16 bp, Artificial Sequence
  Description of Artificial Sequence: Synthetic oligonucleotide
cttaagccctgtgggt

SEQ ID NO: 193 - DNA, 16 bp, Artificial Sequence
  Description of Artificial Sequence: Synthetic oligonucleotide
ttaagccctgtgggtg

SEQ ID NO: 194 - DNA, 16 bp, Artificial Sequence
  Description of Artificial Sequence: Synthetic oligonucleotide
taagccctgtgggtgt

SEQ ID NO: 195 - DNA, 16 bp, Artificial Sequence
  Description of Artificial Sequence: Synthetic oligonucleotide
aagccctgtgggtgtc

SEQ ID NO: 196 - DNA, 16 bp, Artificial Sequence
  Description of Artificial Sequence: Synthetic oligonucleotide
agccctgtgggtgtcc

SEQ ID NO: 197 - DNA, 16 bp, Artificial Sequence
  Description of Artificial Sequence: Synthetic oligonucleotide
gccctgtgggtgtcct

SEQ ID NO: 198 - DNA, 16 bp, Artificial Sequence
  Description of Artificial Sequence: Synthetic oligonucleotide
ccctgtgggtgtcctg

SEQ ID NO: 199 - DNA, 16 bp, Artificial Sequence
  Description of Artificial Sequence: Synthetic oligonucleotide
cctgtgggtgtcctgg

SEQ ID NO: 200 - DNA, 16 bp, Artificial Sequence
  Description of Artificial Sequence: Synthetic oligonucleotide
ctgtgggtgtcctggt

SEQ ID NO: 201 - DNA, 16 bp, Artificial Sequence
  Description of Artificial Sequence: Synthetic oligonucleotide
tgtgggtgtcctggtc

SEQ ID NO: 202 - DNA, 16 bp, Artificial Sequence
  Description of Artificial Sequence: Synthetic oligonucleotide
gtgggtgtcctggtca

SEQ ID NO: 203 - DNA, 16 bp, Artificial Sequence
  Description of Artificial Sequence: Synthetic oligonucleotide
tgggtgtcctggtcat

SEQ ID NO: 204 - DNA, 16 bp, Artificial Sequence
  Description of Artificial Sequence: Synthetic oligonucleotide
gggtgtcctggtcatt

SEQ ID NO: 205 - DNA, 16 bp, Artificial Sequence
  Description of Artificial Sequence: Synthetic oligonucleotide
ggtgtcctggtcattg

SEQ ID NO: 206 - DNA, 16 bp, Artificial Sequence
  Description of Artificial Sequence: Synthetic oligonucleotide
gtgtcctggtcattgg

SEQ ID NO: 207 - DNA, 16 bp, Artificial Sequence
  Description of Artificial Sequence: Synthetic oligonucleotide
tgtcctggtcattggt

SEQ ID NO: 208 - DNA, 17 bp, Artificial Sequence
  Description of Artificial Sequence: Synthetic oligonucleotide
cccaactaatctccatt

SEQ ID NO: 209 - DNA, 17 bp, Artificial Sequence
  Description of Artificial Sequence: Synthetic oligonucleotide
ccaactaatctccattt

SEQ ID NO: 210 - DNA, 17 bp, Artificial Sequence
  Description of Artificial Sequence: Synthetic oligonucleotide
caactaatctccatttg

SEQ ID NO: 211 - DNA, 17 bp, Artificial Sequence
  Description of Artificial Sequence: Synthetic oligonucleotide
aactaatctccatttgc

SEQ ID NO: 212 - DNA, 17 bp, Artificial Sequence
  Description of Artificial Sequence: Synthetic oligonucleotide
actaatctccatttgcc

SEQ ID NO: 213 - DNA, 17 bp, Artificial Sequence
  Description of Artificial Sequence: Synthetic oligonucleotide
ctaatctccatttgcca

SEQ ID NO: 214 - DNA, 17 bp, Artificial Sequence
  Description of Artificial Sequence: Synthetic oligonucleotide
taatctccatttgccac

SEQ ID NO: 215 - DNA, 17 bp, Artificial Sequence
  Description of Artificial Sequence: Synthetic oligonucleotide
aatctccatttgccact

SEQ ID NO: 216 - DNA, 17 bp, Artificial Sequence
  Description of Artificial Sequence: Synthetic oligonucleotide
atctccatttgccactg

SEQ ID NO: 217 - DNA, 17 bp, Artificial Sequence
  Description of Artificial Sequence: Synthetic oligonucleotide
tctccatttgccactga

SEQ ID NO: 218 - DNA, 17 bp, Artificial Sequence
  Description of Artificial Sequence: Synthetic oligonucleotide
ctccatttgccactgac

SEQ ID NO: 219 - DNA, 17 bp, Artificial Sequence
  Description of Artificial Sequence: Synthetic oligonucleotide
tccatttgccactgacc

SEQ ID NO: 220 - DNA, 17 bp, Artificial Sequence
  Description of Artificial Sequence: Synthetic oligonucleotide
ccatttgccactgacca

SEQ ID NO: 221 - DNA, 17 bp, Artificial Sequence
  Description of Artificial Sequence: Synthetic oligonucleotide
catttgccactgaccag

SEQ ID NO: 222 - DNA, 17 bp, Artificial Sequence
  Description of Artificial Sequence: Synthetic oligonucleotide
atttgccactgaccagg

SEQ ID NO: 223 - DNA, 17 bp, Artificial Sequence
  Description of Artificial Sequence: Synthetic oligonucleotide
tttgccactgaccaggc

SEQ ID NO: 224 - DNA, 17 bp, Artificial Sequence
  Description of Artificial Sequence: Synthetic oligonucleotide
ttgccactgaccaggcc

SEQ ID NO: 225 - DNA, 17 bp, Artificial Sequence
  Description of Artificial Sequence: Synthetic oligonucleotide
tgccactgaccaggcca

SEQ ID NO: 226 - DNA, 17 bp, Artificial Sequence
  Description of Artificial Sequence: Synthetic oligonucleotide
gccactgaccaggccac

SEQ ID NO: 227 - DNA, 17 bp, Artificial Sequence
  Description of Artificial Sequence: Synthetic oligonucleotide
ccactgaccaggccaca

SEQ ID NO: 228 - DNA, 17 bp, Artificial Sequence
  Description of Artificial Sequence: Synthetic oligonucleotide
cactgaccaggccacag

SEQ ID NO: 229 - DNA, 17 bp, Artificial Sequence
  Description of Artificial Sequence: Synthetic oligonucleotide
actgaccaggccacaga

SEQ ID NO: 230 - DNA, 17 bp, Artificial Sequence
  Description of Artificial Sequence: Synthetic oligonucleotide
ctgaccaggccacagat

SEQ ID NO: 231 - DNA, 17 bp, Artificial Sequence
  Description of Artificial Sequence: Synthetic oligonucleotide
tgaccaggccacagatg

SEQ ID NO: 232 - DNA, 17 bp, Artificial Sequence
  Description of Artificial Sequence: Synthetic oligonucleotide
gaccaggccacagatgg

SEQ ID NO: 233 - DNA, 17 bp, Artificial Sequence
  Description of Artificial Sequence: Synthetic oligonucleotide
accaggccacagatggg

SEQ ID NO: 234 - DNA, 17 bp, Artificial Sequence
  Description of Artificial Sequence: Synthetic oligonucleotide
ccaggccacagatgggg

SEQ ID NO: 235 - DNA, 17 bp, Artificial Sequence
  Description of Artificial Sequence: Synthetic oligonucleotide
caggccacagatgggga

SEQ ID NO: 236 - DNA, 17 bp, Artificial Sequence
  Description of Artificial Sequence: Synthetic oligonucleotide
aggccacagatggggaa

SEQ ID NO: 237 - DNA, 17 bp, Artificial Sequence
  Description of Artificial Sequence: Synthetic oligonucleotide
ggccacagatggggaag

SEQ ID NO: 238 - DNA, 17 bp, Artificial Sequence
  Description of Artificial Sequence: Synthetic oligonucleotide
gccacagatggggaagt

SEQ ID NO: 239 - DNA, 17 bp, Artificial Sequence
  Description of Artificial Sequence: Synthetic oligonucleotide
ccacagatggggaagtc

SEQ ID NO: 240 - DNA, 17 bp, Artificial Sequence
  Description of Artificial Sequence: Synthetic oligonucleotide
cacagatggggaagtca

SEQ ID NO: 241 - DNA, 17 bp, Artificial Sequence
  Description of Artificial Sequence: Synthetic oligonucleotide
acagatggggaagtcac

SEQ ID NO: 242 - DNA, 17 bp, Artificial Sequence
  Description of Artificial Sequence: Synthetic oligonucleotide
cagatggggaagtcaca

SEQ ID NO: 243 - DNA, 17 bp, Artificial Sequence
  Description of Artificial Sequence: Synthetic oligonucleotide
agatggggaagtcacag

SEQ ID NO: 244 - DNA, 17 bp, Artificial Sequence
  Description of Artificial Sequence: Synthetic oligonucleotide
gatggggaagtcacagc

SEQ ID NO: 245 - DNA, 17 bp, Artificial Sequence
  Description of Artificial Sequence: Synthetic oligonucleotide
atggggaagtcacagcc

SEQ ID NO: 246 - DNA, 17 bp, Artificial Sequence
  Description of Artificial Sequence: Synthetic oligonucleotide
tggggaagtcacagccg

SEQ ID NO: 247 - DNA, 17 bp, Artificial Sequence
  Description of Artificial Sequence: Synthetic oligonucleotide
ggggaagtcacagccgt

SEQ ID NO: 248 - DNA, 17 bp, Artificial Sequence
  Description of Artificial Sequence: Synthetic oligonucleotide
gggaagtcacagccgtg

SEQ ID NO: 249 - DNA, 17 bp, Artificial Sequence
  Description of Artificial Sequence: Synthetic oligonucleotide
ggaagtcacagccgtgg

SEQ ID NO: 250 - DNA, 17 bp, Artificial Sequence
  Description of Artificial Sequence: Synthetic oligonucleotide
gaagtcacagccgtgga

SEQ ID NO: 251 - DNA, 17 bp, Artificial Sequence
  Description of Artificial Sequence: Synthetic oligonucleotide
aagtcacagccgtggag

SEQ ID NO: 252 - DNA, 17 bp, Artificial Sequence
  Description of Artificial Sequence: Synthetic oligonucleotide
agtcacagccgtggagg

SEQ ID NO: 253 - DNA, 17 bp, Artificial Sequence
  Description of Artificial Sequence: Synthetic oligonucleotide
gtcacagccgtggagga

SEQ ID NO: 254 - DNA, 17 bp, Artificial Sequence
  Description of Artificial Sequence: Synthetic oligonucleotide
tcacagccgtggaggag

SEQ ID NO: 255 - DNA, 17 bp, Artificial Sequence
  Description of Artificial Sequence: Synthetic oligonucleotide
cacagccgtggaggagg

SEQ ID NO: 256 - DNA, 17 bp, Artificial Sequence
  Description of Artificial Sequence: Synthetic oligonucleotide
acagccgtggaggaggc

SEQ ID NO: 257 - DNA, 17 bp, Artificial Sequence
  Description of Artificial Sequence: Synthetic oligonucleotide
cagccgtggaggaggca

SEQ ID NO: 258 - DNA, 17 bp, Artificial Sequence
  Description of Artificial Sequence: Synthetic oligonucleotide
agccgtggaggaggcac

SEQ ID NO: 259 - DNA, 17 bp, Artificial Sequence
  Description of Artificial Sequence: Synthetic oligonucleotide
gccgtggaggaggcacc

SEQ ID NO: 260 - DNA, 17 bp, Artificial Sequence
  Description of Artificial Sequence: Synthetic oligonucleotide
ccgtggaggaggcaccg

SEQ ID NO: 261 - DNA, 17 bp, Artificial Sequence
  Description of Artificial Sequence: Synthetic oligonucleotide
cgtggaggaggcaccgg

SEQ ID NO: 262 - DNA, 17 bp, Artificial Sequence
  Description of Artificial Sequence: Synthetic oligonucleotide
gtggaggaggcaccggt

SEQ ID NO: 263 - DNA, 17 bp, Artificial Sequence
  Description of Artificial Sequence: Synthetic oligonucleotide
tggaggaggcaccggta

SEQ ID NO: 264 - DNA, 17 bp, Artificial Sequence
  Description of Artificial Sequence: Synthetic oligonucleotide
ggaggaggcaccggtaa

SEQ ID NO: 265 - DNA, 17 bp, Artificial Sequence
  Description of Artificial Sequence: Synthetic oligonucleotide
gaggaggcaccggtaaa

SEQ ID NO: 266 - DNA, 17 bp, Artificial Sequence
  Description of Artificial Sequence: Synthetic oligonucleotide
aggaggcaccggtaaat

SEQ ID NO: 267 - DNA, 17 bp, Artificial Sequence
  Description of Artificial Sequence: Synthetic oligonucleotide
ggaggcaccggtaaatg

SEQ ID NO: 268 - DNA, 17 bp, Artificial Sequence
  Description of Artificial Sequence: Synthetic oligonucleotide
gaggcaccggtaaatgc

SEQ ID NO: 269 - DNA, 17 bp, Artificial Sequence
  Description of Artificial Sequence: Synthetic oligonucleotide
aggcaccggtaaatgca

SEQ ID NO: 270 - DNA, 17 bp, Artificial Sequence
  Description of Artificial Sequence: Synthetic oligonucleotide
ggcaccggtaaatgcat

SEQ ID NO: 271 - DNA, 17 bp, Artificial Sequence
  Description of Artificial Sequence: Synthetic oligonucleotide
gcaccggtaaatgcatg

SEQ ID NO: 272 - DNA, 17 bp, Artificial Sequence
  Description of Artificial Sequence: Synthetic oligonucleotide
caccggtaaatgcatgt

SEQ ID NO: 273 - DNA, 17 bp, Artificial Sequence
  Description of Artificial Sequence: Synthetic oligonucleotide
accggtaaatgcatgtc

SEQ ID NO: 274 - DNA, 17 bp, Artificial Sequence
  Description of Artificial Sequence: Synthetic oligonucleotide
ccggtaaatgcatgtcc

SEQ ID NO: 275 - DNA, 17 bp, Artificial Sequence
  Description of Artificial Sequence: Synthetic oligonucleotide
cggtaaatgcatgtccc

SEQ ID NO: 276 - DNA, 17 bp, Artificial Sequence
  Description of Artificial Sequence: Synthetic oligonucleotide
ggtaaatgcatgtcccc

SEQ ID NO: 277 - DNA, 17 bp, Artificial Sequence
  Description of Artificial Sequence: Synthetic oligonucleotide
gtaaatgcatgtccccc

SEQ ID NO: 278 - DNA, 17 bp, Artificial Sequence
  Description of Artificial Sequence: Synthetic oligonucleotide
taaatgcatgtccccct

SEQ ID NO: 279 - DNA, 17 bp, Artificial Sequence
  Description of Artificial Sequence: Synthetic oligonucleotide
aaatgcatgtccccctg

SEQ ID NO: 280 - DNA, 17 bp, Artificial Sequence
  Description of Artificial Sequence: Synthetic oligonucleotide
aatgcatgtccccctgg

SEQ ID NO: 281 - DNA, 17 bp, Artificial Sequence
  Description of Artificial Sequence: Synthetic oligonucleotide
atgcatgtccccctgga

SEQ ID NO: 282 - DNA, 17 bp, Artificial Sequence
  Description of Artificial Sequence: Synthetic oligonucleotide
tgcatgtccccctggat

SEQ ID NO: 283 - DNA, 17 bp, Artificial Sequence
  Description of Artificial Sequence: Synthetic oligonucleotide
gcatgtccccctggatt

SEQ ID NO: 284 - DNA, 17 bp, Artificial Sequence
  Description of Artificial Sequence: Synthetic oligonucleotide
catgtccccctggattc

SEQ ID NO: 285 - DNA, 17 bp, Artificial Sequence
  Description of Artificial Sequence: Synthetic oligonucleotide
atgtccccctggattca

SEQ ID NO: 286 - DNA, 17 bp, Artificial Sequence
  Description of Artificial Sequence: Synthetic oligonucleotide
tgtccccctggattcag

SEQ ID NO: 287 - DNA, 17 bp, Artificial Sequence
  Description of Artificial Sequence: Synthetic oligonucleotide
gtccccctggattcagg

SEQ ID NO: 288 - DNA, 17 bp, Artificial Sequence
  Description of Artificial Sequence: Synthetic oligonucleotide
tccccctggattcaggc

SEQ ID NO: 289 - DNA, 17 bp, Artificial Sequence
  Description of Artificial Sequence: Synthetic oligonucleotide
ccccctggattcaggcc

SEQ ID NO: 290 - DNA, 17 bp, Artificial Sequence
  Description of Artificial Sequence: Synthetic oligonucleotide
cccctggattcaggccc

SEQ ID NO: 291 - DNA, 17 bp, Artificial Sequence
  Description of Artificial Sequence: Synthetic oligonucleotide
ccctggattcaggccct

SEQ ID NO: 292 - DNA, 17 bp, Artificial Sequence
  Description of Artificial Sequence: Synthetic oligonucleotide
cctggattcaggccctg

SEQ ID NO: 293 - DNA, 17 bp, Artificial Sequence
  Description of Artificial Sequence: Synthetic oligonucleotide
ctggattcaggccctgg

SEQ ID NO: 294 - DNA, 17 bp, Artificial Sequence
  Description of Artificial Sequence: Synthetic oligonucleotide
tggattcaggccctggg

SEQ ID NO: 295 - DNA, 17 bp, Artificial Sequence
  Description of Artificial Sequence: Synthetic oligonucleotide
ggattcaggccctgggt

SEQ ID NO: 296 - DNA, 17 bp, Artificial Sequence
  Description of Artificial Sequence: Synthetic oligonucleotide
gattcaggccctgggta

SEQ ID NO: 297 - DNA, 17 bp, Artificial Sequence
  Description of Artificial Sequence: Synthetic oligonucleotide
attcaggccctgggtac

SEQ ID NO: 298 - DNA, 17 bp, Artificial Sequence
  Description of Artificial Sequence: Synthetic oligonucleotide
ttcaggccctgggtaca

SEQ ID NO: 299 - DNA, 17 bp, Artificial Sequence
  Description of Artificial Sequence: Synthetic oligonucleotide
tcaggccctgggtacaa

SEQ ID NO: 300 - DNA, 17 bp, Artificial Sequence
  Description of Artificial Sequence: Synthetic oligonucleotide
caggccctgggtacaat

SEQ ID NO: 301 - DNA, 17 bp, Artificial Sequence
  Description of Artificial Sequence: Synthetic oligonucleotide
aggccctgggtacaatt

SEQ ID NO: 302 - DNA, 17 bp, Artificial Sequence
  Description of Artificial Sequence: Synthetic oligonucleotide
ggccctgggtacaattt

SEQ ID NO: 303 - DNA, 17 bp, Artificial Sequence
  Description of Artificial Sequence: Synthetic oligonucleotide
gccctgggtacaatttt

SEQ ID NO: 304 - DNA, 17 bp, Artificial Sequence
  Description of Artificial Sequence: Synthetic oligonucleotide
ccctgggtacaattttg

SEQ ID NO: 305 - DNA, 17 bp, Artificial Sequence
  Description of Artificial Sequence: Synthetic oligonucleotide
cctgggtacaattttgg

SEQ ID NO: 306 - DNA, 17 bp, Artificial Sequence
  Description of Artificial Sequence: Synthetic oligonucleotide
ctgggtacaattttggt

SEQ ID NO: 307 - DNA, 17 bp, Artificial Sequence
  Description of Artificial Sequence: Synthetic oligonucleotide
tgggtacaattttggtt

SEQ ID NO: 308 - DNA, 17 bp, Artificial Sequence
  Description of Artificial Sequence: Synthetic oligonucleotide
gggtacaattttggttt

SEQ ID NO: 309 - DNA, 17 bp, Artificial Sequence
  Description of Artificial Sequence: Synthetic oligonucleotide
ggtacaattttggtttt

SEQ ID NO: 310 - DNA, 17 bp, Artificial Sequence
  Description of Artificial Sequence: Synthetic oligonucleotide
gtacaattttggttttt

SEQ ID NO: 311 - DNA, 17 bp, Artificial Sequence
  Description of Artificial Sequence: Synthetic oligonucleotide
tacaattttggtttttt

SEQ ID NO: 312 - DNA, 17 bp, Artificial Sequence
  Description of Artificial Sequence: Synthetic oligonucleotide
acaattttggttttttc

SEQ ID NO: 313 - DNA, 17 bp, Artificial Sequence
  Description of Artificial Sequence: Synthetic oligonucleotide
caattttggttttttcc

SEQ ID NO: 314 - DNA, 17 bp, Artificial Sequence
  Description of Artificial Sequence: Synthetic oligonucleotide
aattttggttttttcct

SEQ ID NO: 315 - DNA, 17 bp, Artificial Sequence
  Description of Artificial Sequence: Synthetic oligonucleotide
attttggttttttcctt

SEQ ID NO: 316 - DNA, 17 bp, Artificial Sequence
  Description of Artificial Sequence: Synthetic oligonucleotide
ttttggttttttccttt

SEQ ID NO: 317 - DNA, 17 bp, Artificial Sequence
  Description of Artificial Sequence: Synthetic oligonucleotide
tttggttttttcctttt

SEQ ID NO: 318 - DNA, 17 bp, Artificial Sequence
  Description of Artificial Sequence: Synthetic oligonucleotide
ttggttttttccttttt

SEQ ID NO: 319 - DNA, 17 bp, Artificial Sequence
  Description of Artificial Sequence: Synthetic oligonucleotide
tggttttttcctttttg

SEQ ID NO: 320 - DNA, 17 bp, Artificial Sequence
  Description of Artificial Sequence: Synthetic oligonucleotide
ggttttttcctttttgt

SEQ ID NO: 321 - DNA, 17 bp, Artificial Sequence
  Description of Artificial Sequence: Synthetic oligonucleotide
gttttttcctttttgtg

SEQ ID NO: 322 - DNA, 17 bp, Artificial Sequence
  Description of Artificial Sequence: Synthetic oligonucleotide
ttttttcctttttgtgt

SEQ ID NO: 323 - DNA, 17 bp, Artificial Sequence
  Description of Artificial Sequence: Synthetic oligonucleotide
tttttcctttttgtgtt

SEQ ID NO: 324 - DNA, 17 bp, Artificial Sequence
  Description of Artificial Sequence: Synthetic oligonucleotide
ttttcctttttgtgttt

SEQ ID NO: 325 - DNA, 17 bp, Artificial Sequence
  Description of Artificial Sequence: Synthetic oligonucleotide
tttcctttttgtgtttc

SEQ ID NO: 326 - DNA, 17 bp, Artificial Sequence
  Description of Artificial Sequence: Synthetic oligonucleotide
ttcctttttgtgtttct

SEQ ID NO: 327 - DNA, 17 bp, Artificial Sequence
  Description of Artificial Sequence: Synthetic oligonucleotide
tcctttttgtgtttctg

SEQ ID NO: 328 - DNA, 17 bp, Artificial Sequence
  Description of Artificial Sequence: Synthetic oligonucleotide
cctttttgtgtttctgt

SEQ ID NO: 329 - DNA, 17 bp, Artificial Sequence
  Description of Artificial Sequence: Synthetic oligonucleotide
ctttttgtgtttctgtg

SEQ ID NO: 330 - DNA, 17 bp, Artificial Sequence
  Description of Artificial Sequence: Synthetic oligonucleotide
tttttgtgtttctgtgt

SEQ ID NO: 331 - DNA, 17 bp, Artificial Sequence
  Description of Artificial Sequence: Synthetic oligonucleotide
ttttgtgtttctgtgtt

SEQ ID NO: 332 - DNA, 17 bp, Artificial Sequence
  Description of Artificial Sequence: Synthetic oligonucleotide
tttgtgtttctgtgttt

SEQ ID NO: 333 - DNA, 17 bp, Artificial Sequence
  Description of Artificial Sequence: Synthetic oligonucleotide
ttgtgtttctgtgttta

SEQ ID NO: 334 - DNA, 17 bp, Artificial Sequence
  Description of Artificial Sequence: Synthetic oligonucleotide
tgtgtttctgtgtttac

SEQ ID NO: 335 - DNA, 17 bp, Artificial Sequence
  Description of Artificial Sequence: Synthetic oligonucleotide
gtgtttctgtgtttact

SEQ ID NO: 336 - DNA, 17 bp, Artificial Sequence
  Description of Artificial Sequence: Synthetic oligonucleotide
tgtttctgtgtttactc

SEQ ID NO: 337 - DNA, 17 bp, Artificial Sequence
  Description of Artificial Sequence: Synthetic oligonucleotide
gtttctgtgtttactca

SEQ ID NO: 338 - DNA, 17 bp, Artificial Sequence
  Description of Artificial Sequence: Synthetic oligonucleotide
tttctgtgtttactcag

SEQ ID NO: 339 - DNA, 17 bp, Artificial Sequence
  Description of Artificial Sequence: Synthetic oligonucleotide
ttctgtgtttactcagc

SEQ ID NO: 340 - DNA, 17 bp, Artificial Sequence
  Description of Artificial Sequence: Synthetic oligonucleotide
tctgtgtttactcagcc

SEQ ID NO: 341 - DNA, 17 bp, Artificial Sequence
  Description of Artificial Sequence: Synthetic oligonucleotide
ctgtgtttactcagcct

SEQ ID NO: 342 - DNA, 17 bp, Artificial Sequence
  Description of Artificial Sequence: Synthetic oligonucleotide
tgtgtttactcagcctt

SEQ ID NO: 343 - DNA, 17 bp, Artificial Sequence
  Description of Artificial Sequence: Synthetic oligonucleotide
gtgtttactcagccttc

SEQ ID NO: 344 - DNA, 17 bp, Artificial Sequence
  Description of Artificial Sequence: Synthetic oligonucleotide
tgtttactcagccttca

SEQ ID NO: 345 - DNA, 17 bp, Artificial Sequence
  Description of Artificial Sequence: Synthetic oligonucleotide
gtttactcagccttcat

SEQ ID NO: 346 - DNA, 17 bp, Artificial Sequence
  Description of Artificial Sequence: Synthetic oligonucleotide
tttactcagccttcatt

SEQ ID NO: 347 - DNA, 17 bp, Artificial Sequence
  Description of Artificial Sequence: Synthetic oligonucleotide
ttactcagccttcattt

SEQ ID NO: 348 - DNA, 17 bp, Artificial Sequence
  Description of Artificial Sequence: Synthetic oligonucleotide
tactcagccttcatttc

SEQ ID NO: 349 - DNA, 17 bp, Artificial Sequence
  Description of Artificial Sequence: Synthetic oligonucleotide
actcagccttcatttca

SEQ ID NO: 350 - DNA, 17 bp, Artificial Sequence
  Description of Artificial Sequence: Synthetic oligonucleotide
ctcagccttcatttcag

SEQ ID NO: 351 - DNA, 17 bp, Artificial Sequence
  Description of Artificial Sequence: Synthetic oligonucleotide
tcagccttcatttcaga

SEQ ID NO: 352 - DNA, 17 bp, Artificial Sequence
  Description of Artificial Sequence: Synthetic oligonucleotide
cagccttcatttcagaa

SEQ ID NO: 353 - DNA, 17 bp, Artificial Sequence
  Description of Artificial Sequence: Synthetic oligonucleotide
agccttcatttcagaaa

SEQ ID NO: 354 - DNA, 17 bp, Artificial Sequence
  Description of Artificial Sequence: Synthetic oligonucleotide
gccttcatttcagaaaa

SEQ ID NO: 355 - DNA, 17 bp, Artificial Sequence
  Description of Artificial Sequence: Synthetic oligonucleotide
ccttcatttcagaaaat

SEQ ID NO: 356 - DNA, 17 bp, Artificial Sequence
  Description of Artificial Sequence: Synthetic oligonucleotide
cttcatttcagaaaatc

SEQ ID NO: 357 - DNA, 17 bp, Artificial Sequence
  Description of Artificial Sequence: Synthetic oligonucleotide
ttcatttcagaaaatct

SEQ ID NO: 358 - DNA, 17 bp, Artificial Sequence
  Description of Artificial Sequence: Synthetic oligonucleotide
tcatttcagaaaatctg

SEQ ID NO: 359 - DNA, 17 bp, Artificial Sequence
  Description of Artificial Sequence: Synthetic oligonucleotide
catttcagaaaatctgc

SEQ ID NO: 360 - DNA, 17 bp, Artificial Sequence
  Description of Artificial Sequence: Synthetic oligonucleotide
atttcagaaaatctgcc

SEQ ID NO: 361 - DNA, 17 bp, Artificial Sequence
  Description of Artificial Sequence: Synthetic oligonucleotide
tttcagaaaatctgcca

SEQ ID NO: 362 - DNA, 17 bp, Artificial Sequence
  Description of Artificial Sequence: Synthetic oligonucleotide
ttcagaaaatctgccat

SEQ ID NO: 363 - DNA, 17 bp, Artificial Sequence
  Description of Artificial Sequence: Synthetic oligonucleotide
tcagaaaatctgccatc

SEQ ID NO: 364 - DNA, 17 bp, Artificial Sequence
  Description of Artificial Sequence: Synthetic oligonucleotide
cagaaaatctgccatct

SEQ ID NO: 365 - DNA, 17 bp, Artificial Sequence
  Description of Artificial Sequence: Synthetic oligonucleotide
agaaaatctgccatctg

SEQ ID NO: 366 - DNA, 17 bp, Artificial Sequence
  Description of Artificial Sequence: Synthetic oligonucleotide
gaaaatctgccatctgc

SEQ ID NO: 367 - DNA, 17 bp, Artificial Sequence
  Description of Artificial Sequence: Synthetic oligonucleotide
aaaatctgccatctgct

SEQ ID NO: 368 - DNA, 17 bp, Artificial Sequence
  Description of Artificial Sequence: Synthetic oligonucleotide
aaatctgccatctgctt

SEQ ID NO: 369 - DNA, 17 bp, Artificial Sequence
  Description of Artificial Sequence: Synthetic oligonucleotide
aatctgccatctgcttc

SEQ ID NO: 370 - DNA, 17 bp, Artificial Sequence
  Description of Artificial Sequence: Synthetic oligonucleotide
atctgccatctgcttct

SEQ ID NO: 371 - DNA, 17 bp, Artificial Sequence
  Description of Artificial Sequence: Synthetic oligonucleotide
tctgccatctgcttctg

SEQ ID NO: 372 - DNA, 17 bp, Artificial Sequence
  Description of Artificial Sequence: Synthetic oligonucleotide
ctgccatctgcttctgg

SEQ ID NO: 373 - DNA, 17 bp, Artificial Sequence
  Description of Artificial Sequence: Synthetic oligonucleotide
tgccatctgcttctggg

SEQ ID NO: 374 - DNA, 17 bp, Artificial Sequence
  Description of Artificial Sequence: Synthetic oligonucleotide
gccatctgcttctggga

SEQ ID NO: 375 - DNA, 17 bp, Artificial Sequence
  Description of Artificial Sequence: Synthetic oligonucleotide
ccatctgcttctgggat

SEQ ID NO: 376 - DNA, 17 bp, Artificial Sequence
  Description of Artificial Sequence: Synthetic oligonucleotide
catctgcttctgggatt

SEQ ID NO: 377 - DNA, 17 bp, Artificial Sequence
  Description of Artificial Sequence: Synthetic oligonucleotide
atctgcttctgggattg

SEQ ID NO: 378 - DNA, 17 bp, Artificial Sequence
  Description of Artificial Sequence: Synthetic oligonucleotide
tctgcttctgggattgc

SEQ ID NO: 379 - DNA, 17 bp, Artificial Sequence
  Description of Artificial Sequence: Synthetic oligonucleotide
ctgcttctgggattgct

SEQ ID NO: 380 - DNA, 17 bp, Artificial Sequence
  Description of Artificial Sequence: Synthetic oligonucleotide
tgcttctgggattgctt

SEQ ID NO: 381 - DNA, 17 bp, Artificial Sequence
  Description of Artificial Sequence: Synthetic oligonucleotide
gcttctgggattgctta

SEQ ID NO: 382 - DNA, 17 bp, Artificial Sequence
  Description of Artificial Sequence: Synthetic oligonucleotide
cttctgggattgcttaa

SEQ ID NO: 383 - DNA, 17 bp, Artificial Sequence
  Description of Artificial Sequence: Synthetic oligonucleotide
ttctgggattgcttaag

SEQ ID NO: 384 - DNA, 17 bp, Artificial Sequence
  Description of Artificial Sequence: Synthetic oligonucleotide
tctgggattgcttaagc

SEQ ID NO: 385 - DNA, 17 bp, Artificial Sequence
  Description of Artificial Sequence: Synthetic oligonucleotide
ctgggattgcttaagcc

SEQ ID NO: 386 - DNA, 17 bp, Artificial Sequence
  Description of Artificial Sequence: Synthetic oligonucleotide
tgggattgcttaagccc

SEQ ID NO: 387 - DNA, 17 bp, Artificial Sequence
  Description of Artificial Sequence: Synthetic oligonucleotide
gggattgcttaagccct

SEQ ID NO: 388 - DNA, 17 bp, Artificial Sequence
  Description of Artificial Sequence: Synthetic oligonucleotide
ggattgcttaagccctg

SEQ ID NO: 389 - DNA, 17 bp, Artificial Sequence
  Description of Artificial Sequence: Synthetic oligonucleotide
gattgcttaagccctgt

SEQ ID NO: 390 - DNA, 17 bp, Artificial Sequence
  Description of Artificial Sequence: Synthetic oligonucleotide
attgcttaagccctgtg

SEQ ID NO: 391 - DNA, 17 bp, Artificial Sequence
  Description of Artificial Sequence: Synthetic oligonucleotide
ttgcttaagccctgtgg

SEQ ID NO: 392 - DNA, 17 bp, Artificial Sequence
  Description of Artificial Sequence: Synthetic oligonucleotide
tgcttaagccctgtggg

SEQ ID NO: 393 - DNA, 17 bp, Artificial Sequence
  Description of Artificial Sequence: Synthetic oligonucleotide
gcttaagccctgtgggt

SEQ ID NO: 394 - DNA, 17 bp, Artificial Sequence
  Description of Artificial Sequence: Synthetic oligonucleotide
cttaagccctgtgggtg

SEQ ID NO: 395 - DNA, 17 bp, Artificial Sequence
  Description of Artificial Sequence: Synthetic oligonucleotide
ttaagccctgtgggtgt

SEQ ID NO: 396 - DNA, 17 bp, Artificial Sequence
  Description of Artificial Sequence: Synthetic oligonucleotide
taagccctgtgggtgtc

SEQ ID NO: 397 - DNA, 17 bp, Artificial Sequence
  Description of Artificial Sequence: Synthetic oligonucleotide
aagccctgtgggtgtcc

SEQ ID NO: 398 - DNA, 17 bp, Artificial Sequence
  Description of Artificial Sequence: Synthetic oligonucleotide
agccctgtgggtgtcct

SEQ ID NO: 399 - DNA, 17 bp, Artificial Sequence
  Description of Artificial Sequence: Synthetic oligonucleotide
gccctgtgggtgtcctg

SEQ ID NO: 400 - DNA, 17 bp, Artificial Sequence
  Description of Artificial Sequence: Synthetic oligonucleotide
ccctgtgggtgtcctgg

SEQ ID NO: 401 - DNA, 17 bp, Artificial Sequence
  Description of Artificial Sequence: Synthetic oligonucleotide
cctgtgggtgtcctggt

SEQ ID NO: 402 - DNA, 17 bp, Artificial Sequence
  Description of Artificial Sequence: Synthetic oligonucleotide
ctgtgggtgtcctggtc

SEQ ID NO: 403 - DNA, 17 bp, Artificial Sequence
  Description of Artificial Sequence: Synthetic oligonucleotide
tgtgggtgtcctggtca

SEQ ID NO: 404 - DNA, 17 bp, Artificial Sequence
  Description of Artificial Sequence: Synthetic oligonucleotide
gtgggtgtcctggtcat

SEQ ID NO: 405 - DNA, 17 bp, Artificial Sequence
  Description of Artificial Sequence: Synthetic oligonucleotide
tgggtgtcctggtcatt

SEQ ID NO: 406 - DNA, 17 bp, Artificial Sequence
  Description of Artificial Sequence: Synthetic oligonucleotide
gggtgtcctggtcattg

SEQ ID NO: 407 - DNA, 17 bp, Artificial Sequence
  Description of Artificial Sequence: Synthetic oligonucleotide
ggtgtcctggtcattgg

SEQ ID NO: 408 - DNA, 17 bp, Artificial Sequence
  Description of Artificial Sequence: Synthetic oligonucleotide
gtgtcctggtcattggt

SEQ ID NO: 409 - DNA, 18 bp, Artificial Sequence
  Description of Artificial Sequence: Synthetic oligonucleotide
cccaactaatctccattt

SEQ ID NO: 410 - DNA, 18 bp, Artificial Sequence
  Description of Artificial Sequence: Synthetic oligonucleotide
ccaactaatctccatttg

SEQ ID NO: 411 - DNA, 18 bp, Artificial Sequence
  Description of Artificial Sequence: Synthetic oligonucleotide
caactaatctccatttgc

SEQ ID NO: 412 - DNA, 18 bp, Artificial Sequence
  Description of Artificial Sequence: Synthetic oligonucleotide
aactaatctccatttgcc

SEQ ID NO: 413 - DNA, 18 bp, Artificial Sequence
  Description of Artificial Sequence: Synthetic oligonucleotide
actaatctccatttgcca

SEQ ID NO: 414 - DNA, 18 bp, Artificial Sequence
  Description of Artificial Sequence: Synthetic oligonucleotide
ctaatctccatttgccac

SEQ ID NO: 415 - DNA, 18 bp, Artificial Sequence
  Description of Artificial Sequence: Synthetic oligonucleotide
taatctccatttgccact

SEQ ID NO: 416 - DNA, 18 bp, Artificial Sequence
  Description of Artificial Sequence: Synthetic oligonucleotide
aatctccatttgccactg

SEQ ID NO: 417 - DNA, 18 bp, Artificial Sequence
  Description of Artificial Sequence: Synthetic oligonucleotide
atctccatttgccactga

SEQ ID NO: 418 - DNA, 18 bp, Artificial Sequence
  Description of Artificial Sequence: Synthetic oligonucleotide
tctccatttgccactgac

SEQ ID NO: 419 - DNA, 18 bp, Artificial Sequence
  Description of Artificial Sequence: Synthetic oligonucleotide
ctccatttgccactgacc

SEQ ID NO: 420 - DNA, 18 bp, Artificial Sequence
  Description of Artificial Sequence: Synthetic oligonucleotide
tccatttgccactgacca

SEQ ID NO: 421 - DNA, 18 bp, Artificial Sequence
  Description of Artificial Sequence: Synthetic oligonucleotide
ccatttgccactgaccag

SEQ ID NO: 422 - DNA, 18 bp, Artificial Sequence
  Description of Artificial Sequence: Synthetic oligonucleotide
catttgccactgaccagg

SEQ ID NO: 423 - DNA, 18 bp, Artificial Sequence
  Description of Artificial Sequence: Synthetic oligonucleotide
atttgccactgaccaggc

SEQ ID NO: 424 - DNA, 18 bp, Artificial Sequence
  Description of Artificial Sequence: Synthetic oligonucleotide
tttgccactgaccaggcc

SEQ ID NO: 425 - DNA, 18 bp, Artificial Sequence
  Description of Artificial Sequence: Synthetic oligonucleotide
ttgccactgaccaggcca

SEQ ID NO: 426 - DNA, 18 bp, Artificial Sequence
  Description of Artificial Sequence: Synthetic oligonucleotide
tgccactgaccaggccac

SEQ ID NO: 427 - DNA, 18 bp, Artificial Sequence
  Description of Artificial Sequence: Synthetic oligonucleotide
gccactgaccaggccaca

SEQ ID NO: 428 - DNA, 18 bp, Artificial Sequence
  Description of Artificial Sequence: Synthetic oligonucleotide
ccactgaccaggccacag

SEQ ID NO: 429 - DNA, 18 bp, Artificial Sequence
  Description of Artificial Sequence: Synthetic oligonucleotide
cactgaccaggccacaga

SEQ ID NO: 430 - DNA, 18 bp, Artificial Sequence
  Description of Artificial Sequence: Synthetic oligonucleotide
actgaccaggccacagat

SEQ ID NO: 431 - DNA, 18 bp, Artificial Sequence
  Description of Artificial Sequence: Synthetic oligonucleotide
ctgaccaggccacagatg

SEQ ID NO: 432 - DNA, 18 bp, Artificial Sequence
  Description of Artificial Sequence: Synthetic oligonucleotide
tgaccaggccacagatgg

SEQ ID NO: 433 - DNA, 18 bp, Artificial Sequence
  Description of Artificial Sequence: Synthetic oligonucleotide
gaccaggccacagatggg

SEQ ID NO: 434 - DNA, 18 bp, Artificial Sequence
  Description of Artificial Sequence: Synthetic oligonucleotide
accaggccacagatgggg

SEQ ID NO: 435 - DNA, 18 bp, Artificial Sequence
  Description of Artificial Sequence: Synthetic oligonucleotide
ccaggccacagatgggga

SEQ ID NO: 436 - DNA, 18 bp, Artificial Sequence
  Description of Artificial Sequence: Synthetic oligonucleotide
caggccacagatggggaa

SEQ ID NO: 437 - DNA, 18 bp, Artificial Sequence
  Description of Artificial Sequence: Synthetic oligonucleotide
aggccacagatggggaag

SEQ ID NO: 438 - DNA, 18 bp, Artificial Sequence
  Description of Artificial Sequence: Synthetic oligonucleotide
ggccacagatggggaagt

SEQ ID NO: 439 - DNA, 18 bp, Artificial Sequence
  Description of Artificial Sequence: Synthetic oligonucleotide
gccacagatggggaagtc

SEQ ID NO: 440 - DNA, 18 bp, Artificial Sequence
  Description of Artificial Sequence: Synthetic oligonucleotide
ccacagatggggaagtca

SEQ ID NO: 441 - DNA, 18 bp, Artificial Sequence
  Description of Artificial Sequence: Synthetic oligonucleotide
cacagatggggaagtcac

SEQ ID NO: 442 - DNA, 18 bp, Artificial Sequence
  Description of Artificial Sequence: Synthetic oligonucleotide
acagatggggaagtcaca

SEQ ID NO: 443 - DNA, 18 bp, Artificial Sequence
  Description of Artificial Sequence: Synthetic oligonucleotide
cagatggggaagtcacag

SEQ ID NO: 444 - DNA, 18 bp, Artificial Sequence
  Description of Artificial Sequence: Synthetic oligonucleotide
agatggggaagtcacagc

SEQ ID NO: 445 - DNA, 18 bp, Artificial Sequence
  Description of Artificial Sequence: Synthetic oligonucleotide
gatggggaagtcacagcc

SEQ ID NO: 446 - DNA, 18 bp, Artificial Sequence
  Description of Artificial Sequence: Synthetic oligonucleotide
atggggaagtcacagccg

SEQ ID NO: 447 - DNA, 18 bp, Artificial Sequence
  Description of Artificial Sequence: Synthetic oligonucleotide
tggggaagtcacagccgt

SEQ ID NO: 448 - DNA, 18 bp, Artificial Sequence
  Description of Artificial Sequence: Synthetic oligonucleotide
ggggaagtcacagccgtg

SEQ ID NO: 449 - DNA, 18 bp, Artificial Sequence
  Description of Artificial Sequence: Synthetic oligonucleotide
gggaagtcacagccgtgg

SEQ ID NO: 450 - DNA, 18 bp, Artificial Sequence
  Description of Artificial Sequence: Synthetic oligonucleotide
ggaagtcacagccgtgga

SEQ ID NO: 451 - DNA, 18 bp, Artificial Sequence
  Description of Artificial Sequence: Synthetic oligonucleotide
gaagtcacagccgtggag

SEQ ID NO: 452 - DNA, 18 bp, Artificial Sequence
  Description of Artificial Sequence: Synthetic oligonucleotide
aagtcacagccgtggagg

SEQ ID NO: 453 - DNA, 18 bp, Artificial Sequence
  Description of Artificial Sequence: Synthetic oligonucleotide
agtcacagccgtggagga

SEQ ID NO: 454 - DNA, 18 bp, Artificial Sequence
  Description of Artificial Sequence: Synthetic oligonucleotide
gtcacagccgtggaggag

SEQ ID NO: 455 - DNA, 18 bp, Artificial Sequence
  Description of Artificial Sequence: Synthetic oligonucleotide
tcacagccgtggaggagg

SEQ ID NO: 456 - DNA, 18 bp, Artificial Sequence
  Description of Artificial Sequence: Synthetic oligonucleotide
cacagccgtggaggaggc

SEQ ID NO: 457 - DNA, 18 bp, Artificial Sequence
  Description of Artificial Sequence: Synthetic oligonucleotide
acagccgtggaggaggca

SEQ ID NO: 458 - DNA, 18 bp, Artificial Sequence
  Description of Artificial Sequence: Synthetic oligonucleotide
cagccgtggaggaggcac

SEQ ID NO: 459 - DNA, 18 bp, Artificial Sequence
  Description of Artificial Sequence: Synthetic oligonucleotide
agccgtggaggaggcacc

SEQ ID NO: 460 - DNA, 18 bp, Artificial Sequence
  Description of Artificial Sequence: Synthetic oligonucleotide
gccgtggaggaggcaccg

SEQ ID NO: 461 - DNA, 18 bp, Artificial Sequence
  Description of Artificial Sequence: Synthetic oligonucleotide
ccgtggaggaggcaccgg

SEQ ID NO: 462 - DNA, 18 bp, Artificial Sequence
  Description of Artificial Sequence: Synthetic oligonucleotide
cgtggaggaggcaccggt

SEQ ID NO: 463 - DNA, 18 bp, Artificial Sequence
  Description of Artificial Sequence: Synthetic oligonucleotide
gtggaggaggcaccggta

SEQ ID NO: 464 - DNA, 18 bp, Artificial Sequence
  Description of Artificial Sequence: Synthetic oligonucleotide
tggaggaggcaccggtaa

SEQ ID NO: 465 - DNA, 18 bp, Artificial Sequence
  Description of Artificial Sequence: Synthetic oligonucleotide
ggaggaggcaccggtaaa

SEQ ID NO: 466 - DNA, 18 bp, Artificial Sequence
  Description of Artificial Sequence: Synthetic oligonucleotide
gaggaggcaccggtaaat

SEQ ID NO: 467 - DNA, 18 bp, Artificial Sequence
  Description of Artificial Sequence: Synthetic oligonucleotide
aggaggcaccggtaaatg

SEQ ID NO: 468 - DNA, 18 bp, Artificial Sequence
  Description of Artificial Sequence: Synthetic oligonucleotide
ggaggcaccggtaaatgc

SEQ ID NO: 469 - DNA, 18 bp, Artificial Sequence
  Description of Artificial Sequence: Synthetic oligonucleotide
gaggcaccggtaaatgca

SEQ ID NO: 470 - DNA, 18 bp, Artificial Sequence
  Description of Artificial Sequence: Synthetic oligonucleotide
aggcaccggtaaatgcat

SEQ ID NO: 471 - DNA, 18 bp, Artificial Sequence
  Description of Artificial Sequence: Synthetic oligonucleotide
ggcaccggtaaatgcatg

SEQ ID NO: 472 - DNA, 18 bp, Artificial Sequence
  Description of Artificial Sequence: Synthetic oligonucleotide
gcaccggtaaatgcatgt

SEQ ID NO: 473 - DNA, 18 bp, Artificial Sequence
  Description of Artificial Sequence: Synthetic oligonucleotide
caccggtaaatgcatgtc

SEQ ID NO: 474 - DNA, 18 bp, Artificial Sequence
  Description of Artificial Sequence: Synthetic oligonucleotide
accggtaaatgcatgtcc

SEQ ID NO: 475 - DNA, 18 bp, Artificial Sequence
  Description of Artificial Sequence: Synthetic oligonucleotide
ccggtaaatgcatgtccc

SEQ ID NO: 476 - DNA, 18 bp, Artificial Sequence
  Description of Artificial Sequence: Synthetic oligonucleotide
cggtaaatgcatgtcccc

SEQ ID NO: 477 - DNA, 18 bp, Artificial Sequence
  Description of Artificial Sequence: Synthetic oligonucleotide
ggtaaatgcatgtccccc

SEQ ID NO: 478 - DNA, 18 bp, Artificial Sequence
  Description of Artificial Sequence: Synthetic oligonucleotide
gtaaatgcatgtccccct

SEQ ID NO: 479 - DNA, 18 bp, Artificial Sequence
  Description of Artificial Sequence: Synthetic oligonucleotide
taaatgcatgtccccctg

SEQ ID NO: 480 - DNA, 18 bp, Artificial Sequence
  Description of Artificial Sequence: Synthetic oligonucleotide
aaatgcatgtccccctgg

SEQ ID NO: 481 - DNA, 18 bp, Artificial Sequence
  Description of Artificial Sequence: Synthetic oligonucleotide
aatgcatgtccccctgga

SEQ ID NO: 482 - DNA, 18 bp, Artificial Sequence
  Description of Artificial Sequence: Synthetic oligonucleotide
atgcatgtccccctggat

SEQ ID NO: 483 - DNA, 18 bp, Artificial Sequence
  Description of Artificial Sequence: Synthetic oligonucleotide
tgcatgtccccctggatt

SEQ ID NO: 484 - DNA, 18 bp, Artificial Sequence
  Description of Artificial Sequence: Synthetic oligonucleotide
gcatgtccccctggattc

SEQ ID NO: 485 - DNA, 18 bp, Artificial Sequence
  Description of Artificial Sequence: Synthetic oligonucleotide
catgtccccctggattca

SEQ ID NO: 486 - DNA, 18 bp, Artificial Sequence
  Description of Artificial Sequence: Synthetic oligonucleotide
atgtccccctggattcag

SEQ ID NO: 487 - DNA, 18 bp, Artificial Sequence
  Description of Artificial Sequence: Synthetic oligonucleotide
tgtccccctggattcagg

SEQ ID NO: 488 - DNA, 18 bp, Artificial Sequence
  Description of Artificial Sequence: Synthetic oligonucleotide
gtccccctggattcaggc

SEQ ID NO: 489 - DNA, 18 bp, Artificial Sequence
  Description of Artificial Sequence: Synthetic oligonucleotide
tccccctggattcaggcc

SEQ ID NO: 490 - DNA, 18 bp, Artificial Sequence
  Description of Artificial Sequence: Synthetic oligonucleotide
ccccctggattcaggccc

SEQ ID NO: 491 - DNA, 18 bp, Artificial Sequence
  Description of Artificial Sequence: Synthetic oligonucleotide
cccctggattcaggccct

SEQ ID NO: 492 - DNA, 18 bp, Artificial Sequence
  Description of Artificial Sequence: Synthetic oligonucleotide
ccctggattcaggccctg

SEQ ID NO: 493 - DNA, 18 bp, Artificial Sequence
  Description of Artificial Sequence: Synthetic oligonucleotide
cctggattcaggccctgg

SEQ ID NO: 494 - DNA, 18 bp, Artificial Sequence
  Description of Artificial Sequence: Synthetic oligonucleotide
ctggattcaggccctggg

SEQ ID NO: 495 - DNA, 18 bp, Artificial Sequence
  Description of Artificial Sequence: Synthetic oligonucleotide
tggattcaggccctgggt

SEQ ID NO: 496 - DNA, 18 bp, Artificial Sequence
  Description of Artificial Sequence: Synthetic oligonucleotide
ggattcaggccctgggta

SEQ ID NO: 497 - DNA, 18 bp, Artificial Sequence
  Description of Artificial Sequence: Synthetic oligonucleotide
gattcaggccctgggtac

SEQ ID NO: 498 - DNA, 18 bp, Artificial Sequence
  Description of Artificial Sequence: Synthetic oligonucleotide
attcaggccctgggtaca

SEQ ID NO: 499 - DNA, 18 bp, Artificial Sequence
  Description of Artificial Sequence: Synthetic oligonucleotide
ttcaggccctgggtacaa

SEQ ID NO: 500 - DNA, 18 bp, Artificial Sequence
  Description of Artificial Sequence: Synthetic oligonucleotide
tcaggccctgggtacaat

SEQ ID NO: 501 - DNA, 18 bp, Artificial Sequence
  Description of Artificial Sequence: Synthetic oligonucleotide
caggccctgggtacaatt

SEQ ID NO: 502 - DNA, 18 bp, Artificial Sequence
  Description of Artificial Sequence: Synthetic oligonucleotide
aggccctgggtacaattt

SEQ ID NO: 503 - DNA, 18 bp, Artificial Sequence
  Description of Artificial Sequence: Synthetic oligonucleotide
ggccctgggtacaatttt

SEQ ID NO: 504 - DNA, 18 bp, Artificial Sequence
  Description of Artificial Sequence: Synthetic oligonucleotide
gccctgggtacaattttg

SEQ ID NO: 505 - DNA, 18 bp, Artificial Sequence
  Description of Artificial Sequence: Synthetic oligonucleotide
ccctgggtacaattttgg

SEQ ID NO: 506 - DNA, 18 bp, Artificial Sequence
  Description of Artificial Sequence: Synthetic oligonucleotide
cctgggtacaattttggt

SEQ ID NO: 507 - DNA, 18 bp, Artificial Sequence
  Description of Artificial Sequence: Synthetic oligonucleotide
ctgggtacaattttggtt

SEQ ID NO: 508 - DNA, 18 bp, Artificial Sequence
  Description of Artificial Sequence: Synthetic oligonucleotide
tgggtacaattttggttt

SEQ ID NO: 509 - DNA, 18 bp, Artificial Sequence
  Description of Artificial Sequence: Synthetic oligonucleotide
gggtacaattttggtttt

SEQ ID NO: 510 - DNA, 18 bp, Artificial Sequence
  Description of Artificial Sequence: Synthetic oligonucleotide
ggtacaattttggttttt

SEQ ID NO: 511 - DNA, 18 bp, Artificial Sequence
  Description of Artificial Sequence: Synthetic oligonucleotide
gtacaattttggtttttt

SEQ ID NO: 512 - DNA, 18 bp, Artificial Sequence
  Description of Artificial Sequence: Synthetic oligonucleotide
tacaattttggttttttc

SEQ ID NO: 513 - DNA, 18 bp, Artificial Sequence
  Description of Artificial Sequence: Synthetic oligonucleotide
acaattttggttttttcc

SEQ ID NO: 514 - DNA, 18 bp, Artificial Sequence
  Description of Artificial Sequence: Synthetic oligonucleotide
caattttggttttttcct

SEQ ID NO: 515 - DNA, 18 bp, Artificial Sequence
  Description of Artificial Sequence: Synthetic oligonucleotide
aattttggttttttcctt

SEQ ID NO: 516 - DNA, 18 bp, Artificial Sequence
  Description of Artificial Sequence: Synthetic oligonucleotide
attttggttttttccttt

SEQ ID NO: 517 - DNA, 18 bp, Artificial Sequence
  Description of Artificial Sequence: Synthetic oligonucleotide
ttttggttttttcctttt

SEQ ID NO: 518 - DNA, 18 bp, Artificial Sequence
  Description of Artificial Sequence: Synthetic oligonucleotide
tttggttttttccttttt

SEQ ID NO: 519 - DNA, 18 bp, Artificial Sequence
  Description of Artificial Sequence: Synthetic oligonucleotide
ttggttttttcctttttg

SEQ ID NO: 520 - DNA, 18 bp, Artificial Sequence
  Description of Artificial Sequence: Synthetic oligonucleotide
tggttttttcctttttgt

SEQ ID NO: 521 - DNA, 18 bp, Artificial Sequence
  Description of Artificial Sequence: Synthetic oligonucleotide
ggttttttcctttttgtg

SEQ ID NO: 522 - DNA, 18 bp, Artificial Sequence
  Description of Artificial Sequence: Synthetic oligonucleotide
gttttttcctttttgtgt

SEQ ID NO: 523 - DNA, 18 bp, Artificial Sequence
  Description of Artificial Sequence: Synthetic oligonucleotide
ttttttcctttttgtgtt

SEQ ID NO: 524 - DNA, 18 bp, Artificial Sequence
  Description of Artificial Sequence: Synthetic oligonucleotide
tttttcctttttgtgttt

SEQ ID NO: 525 - DNA, 18 bp, Artificial Sequence
  Description of Artificial Sequence: Synthetic oligonucleotide
ttttcctttttgtgtttc

SEQ ID NO: 526 - DNA, 18 bp, Artificial Sequence
  Description of Artificial Sequence: Synthetic oligonucleotide
tttcctttttgtgtttct

SEQ ID NO: 527 - DNA, 18 bp, Artificial Sequence
  Description of Artificial Sequence: Synthetic oligonucleotide
ttcctttttgtgtttctg

SEQ ID NO: 528 - DNA, 18 bp, Artificial Sequence
  Description of Artificial Sequence: Synthetic oligonucleotide
tcctttttgtgtttctgt

SEQ ID NO: 529 - DNA, 18 bp, Artificial Sequence
  Description of Artificial Sequence: Synthetic oligonucleotide
cctttttgtgtttctgtg

SEQ ID NO: 530 - DNA, 18 bp, Artificial Sequence
  Description of Artificial Sequence: Synthetic oligonucleotide
ctttttgtgtttctgtgt

SEQ ID NO: 531 - DNA, 18 bp, Artificial Sequence
  Description of Artificial Sequence: Synthetic oligonucleotide
tttttgtgtttctgtgtt

SEQ ID NO: 532 - DNA, 18 bp, Artificial Sequence
  Description of Artificial Sequence: Synthetic oligonucleotide
ttttgtgtttctgtgttt

SEQ ID NO: 533 - DNA, 18 bp, Artificial Sequence
  Description of Artificial Sequence: Synthetic oligonucleotide
tttgtgtttctgtgttta

SEQ ID NO: 534 - DNA, 18 bp, Artificial Sequence
  Description of Artificial Sequence: Synthetic oligonucleotide
ttgtgtttctgtgtttac

SEQ ID NO: 535 - DNA, 18 bp, Artificial Sequence
  Description of Artificial Sequence: Synthetic oligonucleotide
tgtgtttctgtgtttact

SEQ ID NO: 536 - DNA, 18 bp, Artificial Sequence
  Description of Artificial Sequence: Synthetic oligonucleotide
gtgtttctgtgtttactc

SEQ ID NO: 537 - DNA, 18 bp, Artificial Sequence
  Description of Artificial Sequence: Synthetic oligonucleotide
tgtttctgtgtttactca

SEQ ID NO: 538 - DNA, 18 bp, Artificial Sequence
  Description of Artificial Sequence: Synthetic oligonucleotide
gtttctgtgtttactcag

SEQ ID NO: 539 - DNA, 18 bp, Artificial Sequence
  Description of Artificial Sequence: Synthetic oligonucleotide
tttctgtgtttactcagc

SEQ ID NO: 540 - DNA, 18 bp, Artificial Sequence
  Description of Artificial Sequence: Synthetic oligonucleotide
ttctgtgtttactcagcc

SEQ ID NO: 541 - DNA, 18 bp, Artificial Sequence
  Description of Artificial Sequence: Synthetic oligonucleotide
tctgtgtttactcagcct

SEQ ID NO: 542 - DNA, 18 bp, Artificial Sequence
  Description of Artificial Sequence: Synthetic oligonucleotide
ctgtgtttactcagcctt

SEQ ID NO: 543 - DNA, 18 bp, Artificial Sequence
  Description of Artificial Sequence: Synthetic oligonucleotide
tgtgtttactcagccttc

SEQ ID NO: 544 - DNA, 18 bp, Artificial Sequence
  Description of Artificial Sequence: Synthetic oligonucleotide
gtgtttactcagccttca

SEQ ID NO: 545 - DNA, 18 bp, Artificial Sequence
  Description of Artificial Sequence: Synthetic oligonucleotide
tgtttactcagccttcat

SEQ ID NO: 546 - DNA, 18 bp, Artificial Sequence
  Description of Artificial Sequence: Synthetic oligonucleotide
gtttactcagccttcatt

SEQ ID NO: 547 - DNA, 18 bp, Artificial Sequence
  Description of Artificial Sequence: Synthetic oligonucleotide
tttactcagccttcattt

SEQ ID NO: 548 - DNA, 18 bp, Artificial Sequence
  Description of Artificial Sequence: Synthetic oligonucleotide
ttactcagccttcatttc

SEQ ID NO: 549 - DNA, 18 bp, Artificial Sequence
  Description of Artificial Sequence: Synthetic oligonucleotide
tactcagccttcatttca

SEQ ID NO: 550 - DNA, 18 bp, Artificial Sequence
  Description of Artificial Sequence: Synthetic oligonucleotide
actcagccttcatttcag

SEQ ID NO: 551 - DNA, 18 bp, Artificial Sequence
  Description of Artificial Sequence: Synthetic oligonucleotide
ctcagccttcatttcaga

SEQ ID NO: 552 - DNA, 18 bp, Artificial Sequence
  Description of Artificial Sequence: Synthetic oligonucleotide
tcagccttcatttcagaa

SEQ ID NO: 553 - DNA, 18 bp, Artificial Sequence
  Description of Artificial Sequence: Synthetic oligonucleotide
cagccttcatttcagaaa

SEQ ID NO: 554 - DNA, 18 bp, Artificial Sequence
  Description of Artificial Sequence: Synthetic oligonucleotide
agccttcatttcagaaaa

SEQ ID NO: 555 - DNA, 18 bp, Artificial Sequence
  Description of Artificial Sequence: Synthetic oligonucleotide
gccttcatttcagaaaat

SEQ ID NO: 556 - DNA, 18 bp, Artificial Sequence
  Description of Artificial Sequence: Synthetic oligonucleotide
ccttcatttcagaaaatc

SEQ ID NO: 557 - DNA, 18 bp, Artificial Sequence
  Description of Artificial Sequence: Synthetic oligonucleotide
cttcatttcagaaaatct

SEQ ID NO: 558 - DNA, 18 bp, Artificial Sequence
  Description of Artificial Sequence: Synthetic oligonucleotide
ttcatttcagaaaatctg

SEQ ID NO: 559 - DNA, 18 bp, Artificial Sequence
  Description of Artificial Sequence: Synthetic oligonucleotide
tcatttcagaaaatctgc

SEQ ID NO: 560 - DNA, 18 bp, Artificial Sequence
  Description of Artificial Sequence: Synthetic oligonucleotide
catttcagaaaatctgcc

SEQ ID NO: 561 - DNA, 18 bp, Artificial Sequence
  Description of Artificial Sequence: Synthetic oligonucleotide
atttcagaaaatctgcca

SEQ ID NO: 562 - DNA, 18 bp, Artificial Sequence
  Description of Artificial Sequence: Synthetic oligonucleotide
tttcagaaaatctgccat

SEQ ID NO: 563 - DNA, 18 bp, Artificial Sequence
  Description of Artificial Sequence: Synthetic oligonucleotide
ttcagaaaatctgccatc

SEQ ID NO: 564 - DNA, 18 bp, Artificial Sequence
  Description of Artificial Sequence: Synthetic oligonucleotide
tcagaaaatctgccatct

SEQ ID NO: 565 - DNA, 18 bp, Artificial Sequence
  Description of Artificial Sequence: Synthetic oligonucleotide
cagaaaatctgccatctg

SEQ ID NO: 566 - DNA, 18 bp, Artificial Sequence
  Description of Artificial Sequence: Synthetic oligonucleotide
agaaaatctgccatctgc

SEQ ID NO: 567 - DNA, 18 bp, Artificial Sequence
  Description of Artificial Sequence: Synthetic oligonucleotide
gaaaatctgccatctgct

SEQ ID NO: 568 - DNA, 18 bp, Artificial Sequence
  Description of Artificial Sequence: Synthetic oligonucleotide
aaaatctgccatctgctt

SEQ ID NO: 569 - DNA, 18 bp, Artificial Sequence
  Description of Artificial Sequence: Synthetic oligonucleotide
aaatctgccatctgcttc

SEQ ID NO: 570 - DNA, 18 bp, Artificial Sequence
  Description of Artificial Sequence: Synthetic oligonucleotide
aatctgccatctgcttct

SEQ ID NO: 571 - DNA, 18 bp, Artificial Sequence
  Description of Artificial Sequence: Synthetic oligonucleotide
atctgccatctgcttctg

SEQ ID NO: 572 - DNA, 18 bp, Artificial Sequence
  Description of Artificial Sequence: Synthetic oligonucleotide
tctgccatctgcttctgg

SEQ ID NO: 573 - DNA, 18 bp, Artificial Sequence
  Description of Artificial Sequence: Synthetic oligonucleotide
ctgccatctgcttctggg

SEQ ID NO: 574 - DNA, 18 bp, Artificial Sequence
  Description of Artificial Sequence: Synthetic oligonucleotide
tgccatctgcttctggga

SEQ ID NO: 575 - DNA, 18 bp, Artificial Sequence
  Description of Artificial Sequence: Synthetic oligonucleotide
gccatctgcttctgggat

SEQ ID NO: 576 - DNA, 18 bp, Artificial Sequence
  Description of Artificial Sequence: Synthetic oligonucleotide
ccatctgcttctgggatt

SEQ ID NO: 577 - DNA, 18 bp, Artificial Sequence
  Description of Artificial Sequence: Synthetic oligonucleotide
catctgcttctgggattg

SEQ ID NO: 578 - DNA, 18 bp, Artificial Sequence
  Description of Artificial Sequence: Synthetic oligonucleotide
atctgcttctgggattgc

SEQ ID NO: 579 - DNA, 18 bp, Artificial Sequence
  Description of Artificial Sequence: Synthetic oligonucleotide
tctgcttctgggattgct

SEQ ID NO: 580 - DNA, 18 bp, Artificial Sequence
  Description of Artificial Sequence: Synthetic oligonucleotide
ctgcttctgggattgctt

SEQ ID NO: 581 - DNA, 18 bp, Artificial Sequence
  Description of Artificial Sequence: Synthetic oligonucleotide
tgcttctgggattgctta

SEQ ID NO: 582 - DNA, 18 bp, Artificial Sequence
  Description of Artificial Sequence: Synthetic oligonucleotide
gcttctgggattgcttaa

SEQ ID NO: 583 - DNA, 18 bp, Artificial Sequence
  Description of Artificial Sequence: Synthetic oligonucleotide
cttctgggattgcttaag

SEQ ID NO: 584 - DNA, 18 bp, Artificial Sequence
  Description of Artificial Sequence: Synthetic oligonucleotide
ttctgggattgcttaagc

SEQ ID NO: 585 - DNA, 18 bp, Artificial Sequence
  Description of Artificial Sequence: Synthetic oligonucleotide
tctgggattgcttaagcc

SEQ ID NO: 586 - DNA, 18 bp, Artificial Sequence
  Description of Artificial Sequence: Synthetic oligonucleotide
ctgggattgcttaagccc

SEQ ID NO: 587 - DNA, 18 bp, Artificial Sequence
  Description of Artificial Sequence: Synthetic oligonucleotide
tgggattgcttaagccct

SEQ ID NO: 588 - DNA, 18 bp, Artificial Sequence
  Description of Artificial Sequence: Synthetic oligonucleotide
gggattgcttaagccctg

SEQ ID NO: 589 - DNA, 18 bp, Artificial Sequence
  Description of Artificial Sequence: Synthetic oligonucleotide
ggattgcttaagccctgt

SEQ ID NO: 590 - DNA, 18 bp, Artificial Sequence
  Description of Artificial Sequence: Synthetic oligonucleotide
gattgcttaagccctgtg

SEQ ID NO: 591 - DNA, 18 bp, Artificial Sequence
  Description of Artificial Sequence: Synthetic oligonucleotide
attgcttaagccctgtgg

SEQ ID NO: 592 - DNA, 18 bp, Artificial Sequence
  Description of Artificial Sequence: Synthetic oligonucleotide
ttgcttaagccctgtggg

SEQ ID NO: 593 - DNA, 18 bp, Artificial Sequence
  Description of Artificial Sequence: Synthetic oligonucleotide
tgcttaagccctgtgggt

SEQ ID NO: 594 - DNA, 18 bp, Artificial Sequence
  Description of Artificial Sequence: Synthetic oligonucleotide
gcttaagccctgtgggtg

SEQ ID NO: 595 - DNA, 18 bp, Artificial Sequence
  Description of Artificial Sequence: Synthetic oligonucleotide
cttaagccctgtgggtgt

SEQ ID NO: 596 - DNA, 18 bp, Artificial Sequence
  Description of Artificial Sequence: Synthetic oligonucleotide
ttaagccctgtgggtgtc

SEQ ID NO: 597 - DNA, 18 bp, Artificial Sequence
  Description of Artificial Sequence: Synthetic oligonucleotide
taagccctgtgggtgtcc

SEQ ID NO: 598 - DNA, 18 bp, Artificial Sequence
  Description of Artificial Sequence: Synthetic oligonucleotide
aagccctgtgggtgtcct

SEQ ID NO: 599 - DNA, 18 bp, Artificial Sequence
  Description of Artificial Sequence: Synthetic oligonucleotide
agccctgtgggtgtcctg

SEQ ID NO: 600 - DNA, 18 bp, Artificial Sequence
  Description of Artificial Sequence: Synthetic oligonucleotide
gccctgtgggtgtcctgg

SEQ ID NO: 601 - DNA, 18 bp, Artificial Sequence
  Description of Artificial Sequence: Synthetic oligonucleotide
ccctgtgggtgtcctggt

SEQ ID NO: 602 - DNA, 18 bp, Artificial Sequence
  Description of Artificial Sequence: Synthetic oligonucleotide
cctgtgggtgtcctggtc

SEQ ID NO: 603 - DNA, 18 bp, Artificial Sequence
  Description of Artificial Sequence: Synthetic oligonucleotide
ctgtgggtgtcctggtca

SEQ ID NO: 604 - DNA, 18 bp, Artificial Sequence
  Description of Artificial Sequence: Synthetic oligonucleotide
tgtgggtgtcctggtcat

SEQ ID NO: 605 - DNA, 18 bp, Artificial Sequence
  Description of Artificial Sequence: Synthetic oligonucleotide
gtgggtgtcctggtcatt

SEQ ID NO: 606 - DNA, 18 bp, Artificial Sequence
  Description of Artificial Sequence: Synthetic oligonucleotide
tgggtgtcctggtcattg

SEQ ID NO: 607 - DNA, 18 bp, Artificial Sequence
  Description of Artificial Sequence: Synthetic oligonucleotide
gggtgtcctggtcattgg

SEQ ID NO: 608 - DNA, 18 bp, Artificial Sequence
  Description of Artificial Sequence: Synthetic oligonucleotide
ggtgtcctggtcattggt

SEQ ID NO: 609 - DNA, 19 bp, Artificial Sequence
  Description of Artificial Sequence: Synthetic oligonucleotide
cccaactaatctccatttg

SEQ ID NO: 610 - DNA, 19 bp, Artificial Sequence
  Description of Artificial Sequence: Synthetic oligonucleotide
ccaactaatctccatttgc

SEQ ID NO: 611 - DNA, 19 bp, Artificial Sequence
  Description of Artificial Sequence: Synthetic oligonucleotide
caactaatctccatttgcc

SEQ ID NO: 612 - DNA, 19 bp, Artificial Sequence
  Description of Artificial Sequence: Synthetic oligonucleotide
aactaatctccatttgcca

SEQ ID NO: 613 - DNA, 19 bp, Artificial Sequence
  Description of Artificial Sequence: Synthetic oligonucleotide
actaatctccatttgccac

SEQ ID NO: 614 - DNA, 19 bp, Artificial Sequence
  Description of Artificial Sequence: Synthetic oligonucleotide
ctaatctccatttgccact

SEQ ID NO: 615 - DNA, 19 bp, Artificial Sequence
  Description of Artificial Sequence: Synthetic oligonucleotide
taatctccatttgccactg

SEQ ID NO: 616 - DNA, 19 bp, Artificial Sequence
  Description of Artificial Sequence: Synthetic oligonucleotide
aatctccatttgccactga

SEQ ID NO: 617 - DNA, 19 bp, Artificial Sequence
  Description of Artificial Sequence: Synthetic oligonucleotide
atctccatttgccactgac

SEQ ID NO: 618 - DNA, 19 bp, Artificial Sequence
  Description of Artificial Sequence: Synthetic oligonucleotide
tctccatttgccactgacc

SEQ ID NO: 619 - DNA, 19 bp, Artificial Sequence
  Description of Artificial Sequence: Synthetic oligonucleotide
ctccatttgccactgacca

SEQ ID NO: 620 - DNA, 19 bp, Artificial Sequence
  Description of Artificial Sequence: Synthetic oligonucleotide
tccatttgccactgaccag

SEQ ID NO: 621 - DNA, 19 bp, Artificial Sequence
  Description of Artificial Sequence: Synthetic oligonucleotide
ccatttgccactgaccagg

SEQ ID NO: 622 - DNA, 19 bp, Artificial Sequence
  Description of Artificial Sequence: Synthetic oligonucleotide
catttgccactgaccaggc

SEQ ID NO: 623 - DNA, 19 bp, Artificial Sequence
  Description of Artificial Sequence: Synthetic oligonucleotide
atttgccactgaccaggcc

SEQ ID NO: 624 - DNA, 19 bp, Artificial Sequence
  Description of Artificial Sequence: Synthetic oligonucleotide
tttgccactgaccaggcca

SEQ ID NO: 625 - DNA, 19 bp, Artificial Sequence
  Description of Artificial Sequence: Synthetic oligonucleotide
ttgccactgaccaggccac

SEQ ID NO: 626 - DNA, 19 bp, Artificial Sequence
  Description of Artificial Sequence: Synthetic oligonucleotide
tgccactgaccaggccaca

SEQ ID NO: 627 - DNA, 19 bp, Artificial Sequence
  Description of Artificial Sequence: Synthetic oligonucleotide
gccactgaccaggccacag

SEQ ID NO: 628 - DNA, 19 bp, Artificial Sequence
  Description of Artificial Sequence: Synthetic oligonucleotide
ccactgaccaggccacaga

SEQ ID NO: 629 - DNA, 19 bp, Artificial Sequence
  Description of Artificial Sequence: Synthetic oligonucleotide
cactgaccaggccacagat

SEQ ID NO: 630 - DNA, 19 bp, Artificial Sequence
  Description of Artificial Sequence: Synthetic oligonucleotide
actgaccaggccacagatg

SEQ ID NO: 631 - DNA, 19 bp, Artificial Sequence
  Description of Artificial Sequence: Synthetic oligonucleotide
ctgaccaggccacagatgg

SEQ ID NO: 632 - DNA, 19 bp, Artificial Sequence
  Description of Artificial Sequence: Synthetic oligonucleotide
tgaccaggccacagatggg

SEQ ID NO: 633 - DNA, 19 bp, Artificial Sequence
  Description of Artificial Sequence: Synthetic oligonucleotide
gaccaggccacagatgggg

SEQ ID NO: 634 - DNA, 19 bp, Artificial Sequence
  Description of Artificial Sequence: Synthetic oligonucleotide
accaggccacagatgggga

SEQ ID NO: 635 - DNA, 19 bp, Artificial Sequence
  Description of Artificial Sequence: Synthetic oligonucleotide
ccaggccacagatggggaa

SEQ ID NO: 636 - DNA, 19 bp, Artificial Sequence
  Description of Artificial Sequence: Synthetic oligonucleotide
caggccacagatggggaag

SEQ ID NO: 637 - DNA, 19 bp, Artificial Sequence
  Description of Artificial Sequence: Synthetic oligonucleotide
aggccacagatggggaagt

SEQ ID NO: 638 - DNA, 19 bp, Artificial Sequence
  Description of Artificial Sequence: Synthetic oligonucleotide
ggccacagatggggaagtc

SEQ ID NO: 639 - DNA, 19 bp, Artificial Sequence
  Description of Artificial Sequence: Synthetic oligonucleotide
gccacagatggggaagtca

SEQ ID NO: 640 - DNA, 19 bp, Artificial Sequence
  Description of Artificial Sequence: Synthetic oligonucleotide
ccacagatggggaagtcac

SEQ ID NO: 641 - DNA, 19 bp, Artificial Sequence
  Description of Artificial Sequence: Synthetic oligonucleotide
cacagatggggaagtcaca

SEQ ID NO: 642 - DNA, 19 bp, Artificial Sequence
  Description of Artificial Sequence: Synthetic oligonucleotide
acagatggggaagtcacag

SEQ ID NO: 643 - DNA, 19 bp, Artificial Sequence
  Description of Artificial Sequence: Synthetic oligonucleotide
cagatggggaagtcacagc

SEQ ID NO: 644 - DNA, 19 bp, Artificial Sequence
  Description of Artificial Sequence: Synthetic oligonucleotide
agatggggaagtcacagcc

SEQ ID NO: 645 - DNA, 19 bp, Artificial Sequence
  Description of Artificial Sequence: Synthetic oligonucleotide
gatggggaagtcacagccg

SEQ ID NO: 646 - DNA, 19 bp, Artificial Sequence
  Description of Artificial Sequence: Synthetic oligonucleotide
atggggaagtcacagccgt

SEQ ID NO: 647 - DNA, 19 bp, Artificial Sequence
  Description of Artificial Sequence: Synthetic oligonucleotide
tggggaagtcacagccgtg

SEQ ID NO: 648 - DNA, 19 bp, Artificial Sequence
  Description of Artificial Sequence: Synthetic oligonucleotide
ggggaagtcacagccgtgg

SEQ ID NO: 649 - DNA, 19 bp, Artificial Sequence
  Description of Artificial Sequence: Synthetic oligonucleotide
gggaagtcacagccgtgga

SEQ ID NO: 650 - DNA, 19 bp, Artificial Sequence
  Description of Artificial Sequence: Synthetic oligonucleotide
ggaagtcacagccgtggag

SEQ ID NO: 651 - DNA, 19 bp, Artificial Sequence
  Description of Artificial Sequence: Synthetic oligonucleotide
gaagtcacagccgtggagg

SEQ ID NO: 652 - DNA, 19 bp, Artificial Sequence
  Description of Artificial Sequence: Synthetic oligonucleotide
aagtcacagccgtggagga

SEQ ID NO: 653 - DNA, 19 bp, Artificial Sequence
  Description of Artificial Sequence: Synthetic oligonucleotide
agtcacagccgtggaggag

SEQ ID NO: 654 - DNA, 19 bp, Artificial Sequence
  Description of Artificial Sequence: Synthetic oligonucleotide
gtcacagccgtggaggagg

SEQ ID NO: 655 - DNA, 19 bp, Artificial Sequence
  Description of Artificial Sequence: Synthetic oligonucleotide
tcacagccgtggaggaggc

SEQ ID NO: 656 - DNA, 19 bp, Artificial Sequence
  Description of Artificial Sequence: Synthetic oligonucleotide
cacagccgtggaggaggca

SEQ ID NO: 657 - DNA, 19 bp, Artificial Sequence
  Description of Artificial Sequence: Synthetic oligonucleotide
acagccgtggaggaggcac

SEQ ID NO: 658 - DNA, 19 bp, Artificial Sequence
  Description of Artificial Sequence: Synthetic oligonucleotide
cagccgtggaggaggcacc

SEQ ID NO: 659 - DNA, 19 bp, Artificial Sequence
  Description of Artificial Sequence: Synthetic oligonucleotide
agccgtggaggaggcaccg

SEQ ID NO: 660 - DNA, 19 bp, Artificial Sequence
  Description of Artificial Sequence: Synthetic oligonucleotide
gccgtggaggaggcaccgg

SEQ ID NO: 661 - DNA, 19 bp, Artificial Sequence
  Description of Artificial Sequence: Synthetic oligonucleotide
ccgtggaggaggcaccggt

SEQ ID NO: 662 - DNA, 19 bp, Artificial Sequence
  Description of Artificial Sequence: Synthetic oligonucleotide
cgtggaggaggcaccggta

SEQ ID NO: 663 - DNA, 19 bp, Artificial Sequence
  Description of Artificial Sequence: Synthetic oligonucleotide
gtggaggaggcaccggtaa

SEQ ID NO: 664 - DNA, 19 bp, Artificial Sequence
  Description of Artificial Sequence: Synthetic oligonucleotide
tggaggaggcaccggtaaa

SEQ ID NO: 665 - DNA, 19 bp, Artificial Sequence
  Description of Artificial Sequence: Synthetic oligonucleotide
ggaggaggcaccggtaaat

SEQ ID NO: 666 - DNA, 19 bp, Artificial Sequence
  Description of Artificial Sequence: Synthetic oligonucleotide
gaggaggcaccggtaaatg

SEQ ID NO: 667 - DNA, 19 bp, Artificial Sequence
  Description of Artificial Sequence: Synthetic oligonucleotide
aggaggcaccggtaaatgc

SEQ ID NO: 668 - DNA, 19 bp, Artificial Sequence
  Description of Artificial Sequence: Synthetic oligonucleotide
ggaggcaccggtaaatgca

SEQ ID NO: 669 - DNA, 19 bp, Artificial Sequence
  Description of Artificial Sequence: Synthetic oligonucleotide
gaggcaccggtaaatgcat

SEQ ID NO: 670 - DNA, 19 bp, Artificial Sequence
  Description of Artificial Sequence: Synthetic oligonucleotide
aggcaccggtaaatgcatg

SEQ ID NO: 671 - DNA, 19 bp, Artificial Sequence
  Description of Artificial Sequence: Synthetic oligonucleotide
ggcaccggtaaatgcatgt

SEQ ID NO: 672 - DNA, 19 bp, Artificial Sequence
  Description of Artificial Sequence: Synthetic oligonucleotide
gcaccggtaaatgcatgtc

SEQ ID NO: 673 - DNA, 19 bp, Artificial Sequence
  Description of Artificial Sequence: Synthetic oligonucleotide
caccggtaaatgcatgtcc

SEQ ID NO: 674 - DNA, 19 bp, Artificial Sequence
  Description of Artificial Sequence: Synthetic oligonucleotide
accggtaaatgcatgtccc

SEQ ID NO: 675 - DNA, 19 bp, Artificial Sequence
  Description of Artificial Sequence: Synthetic oligonucleotide
ccggtaaatgcatgtcccc

SEQ ID NO: 676 - DNA, 19 bp, Artificial Sequence
  Description of Artificial Sequence: Synthetic oligonucleotide
cggtaaatgcatgtccccc

SEQ ID NO: 677 - DNA, 19 bp, Artificial Sequence
  Description of Artificial Sequence: Synthetic oligonucleotide
ggtaaatgcatgtccccct

SEQ ID NO: 678 - DNA, 19 bp, Artificial Sequence
  Description of Artificial Sequence: Synthetic oligonucleotide
gtaaatgcatgtccccctg

SEQ ID NO: 679 - DNA, 19 bp, Artificial Sequence
  Description of Artificial Sequence: Synthetic oligonucleotide
taaatgcatgtccccctgg

SEQ ID NO: 680 - DNA, 19 bp, Artificial Sequence
  Description of Artificial Sequence: Synthetic oligonucleotide
aaatgcatgtccccctgga

SEQ ID NO: 681 - DNA, 19 bp, Artificial Sequence
  Description of Artificial Sequence: Synthetic oligonucleotide
aatgcatgtccccctggat

SEQ ID NO: 682 - DNA, 19 bp, Artificial Sequence
  Description of Artificial Sequence: Synthetic oligonucleotide
atgcatgtccccctggatt

SEQ ID NO: 683 - DNA, 19 bp, Artificial Sequence
  Description of Artificial Sequence: Synthetic oligonucleotide
tgcatgtccccctggattc

SEQ ID NO: 684 - DNA, 19 bp, Artificial Sequence
  Description of Artificial Sequence: Synthetic oligonucleotide
gcatgtccccctggattca

SEQ ID NO: 685 - DNA, 19 bp, Artificial Sequence
  Description of Artificial Sequence: Synthetic oligonucleotide
catgtccccctggattcag

SEQ ID NO: 686 - DNA, 19 bp, Artificial Sequence
  Description of Artificial Sequence: Synthetic oligonucleotide
atgtccccctggattcagg

SEQ ID NO: 687 - DNA, 19 bp, Artificial Sequence
  Description of Artificial Sequence: Synthetic oligonucleotide
tgtccccctggattcaggc

SEQ ID NO: 688 - DNA, 19 bp, Artificial Sequence
  Description of Artificial Sequence: Synthetic oligonucleotide
gtccccctggattcaggcc

SEQ ID NO: 689 - DNA, 19 bp, Artificial Sequence
  Description of Artificial Sequence: Synthetic oligonucleotide
tccccctggattcaggccc

SEQ ID NO: 690 - DNA, 19 bp, Artificial Sequence
  Description of Artificial Sequence: Synthetic oligonucleotide
ccccctggattcaggccct

SEQ ID NO: 691 - DNA, 19 bp, Artificial Sequence
  Description of Artificial Sequence: Synthetic oligonucleotide
cccctggattcaggccctg

SEQ ID NO: 692 - DNA, 19 bp, Artificial Sequence
  Description of Artificial Sequence: Synthetic oligonucleotide
ccctggattcaggccctgg

SEQ ID NO: 693 - DNA, 19 bp, Artificial Sequence
  Description of Artificial Sequence: Synthetic oligonucleotide
cctggattcaggccctggg

SEQ ID NO: 694 - DNA, 19 bp, Artificial Sequence
  Description of Artificial Sequence: Synthetic oligonucleotide
ctggattcaggccctgggt

SEQ ID NO: 695 - DNA, 19 bp, Artificial Sequence
  Description of Artificial Sequence: Synthetic oligonucleotide
tggattcaggccctgggta

SEQ ID NO: 696 - DNA, 19 bp, Artificial Sequence
  Description of Artificial Sequence: Synthetic oligonucleotide
ggattcaggccctgggtac

SEQ ID NO: 697 - DNA, 19 bp, Artificial Sequence
  Description of Artificial Sequence: Synthetic oligonucleotide
gattcaggccctgggtaca

SEQ ID NO: 698 - DNA, 19 bp, Artificial Sequence
  Description of Artificial Sequence: Synthetic oligonucleotide
attcaggccctgggtacaa

SEQ ID NO: 699 - DNA, 19 bp, Artificial Sequence
  Description of Artificial Sequence: Synthetic oligonucleotide
ttcaggccctgggtacaat

SEQ ID NO: 700 - DNA, 19 bp, Artificial Sequence
  Description of Artificial Sequence: Synthetic oligonucleotide
tcaggccctgggtacaatt

SEQ ID NO: 701 - DNA, 19 bp, Artificial Sequence
  Description of Artificial Sequence: Synthetic oligonucleotide
caggccctgggtacaattt

SEQ ID NO: 702 - DNA, 19 bp, Artificial Sequence
  Description of Artificial Sequence: Synthetic oligonucleotide
aggccctgggtacaatttt

SEQ ID NO: 703 - DNA, 19 bp, Artificial Sequence
  Description of Artificial Sequence: Synthetic oligonucleotide
ggccctgggtacaattttg

SEQ ID NO: 704 - DNA, 19 bp, Artificial Sequence
  Description of Artificial Sequence: Synthetic oligonucleotide
gccctgggtacaattttgg

SEQ ID NO: 705 - DNA, 19 bp, Artificial Sequence
  Description of Artificial Sequence: Synthetic oligonucleotide
ccctgggtacaattttggt

SEQ ID NO: 706 - DNA, 19 bp, Artificial Sequence
  Description of Artificial Sequence: Synthetic oligonucleotide
cctgggtacaattttggtt

SEQ ID NO: 707 - DNA, 19 bp, Artificial Sequence
  Description of Artificial Sequence: Synthetic oligonucleotide
ctgggtacaattttggttt

SEQ ID NO: 708 - DNA, 19 bp, Artificial Sequence
  Description of Artificial Sequence: Synthetic oligonucleotide
tgggtacaattttggtttt

SEQ ID NO: 709 - DNA, 19 bp, Artificial Sequence
  Description of Artificial Sequence: Synthetic oligonucleotide
gggtacaattttggttttt

SEQ ID NO: 710 - DNA, 19 bp, Artificial Sequence
  Description of Artificial Sequence: Synthetic oligonucleotide
ggtacaattttggtttttt

SEQ ID NO: 711 - DNA, 19 bp, Artificial Sequence
  Description of Artificial Sequence: Synthetic oligonucleotide
gtacaattttggttttttc

SEQ ID NO: 712 - DNA, 19 bp, Artificial Sequence
  Description of Artificial Sequence: Synthetic oligonucleotide
tacaattttggttttttcc

SEQ ID NO: 713 - DNA, 19 bp, Artificial Sequence
  Description of Artificial Sequence: Synthetic oligonucleotide
acaattttggttttttcct

SEQ ID NO: 714 - DNA, 19 bp, Artificial Sequence
  Description of Artificial Sequence: Synthetic oligonucleotide
caattttggttttttcctt

SEQ ID NO: 715 - DNA, 19 bp, Artificial Sequence
  Description of Artificial Sequence: Synthetic oligonucleotide
aattttggttttttccttt

SEQ ID NO: 716 - DNA, 19 bp, Artificial Sequence
  Description of Artificial Sequence: Synthetic oligonucleotide
attttggttttttcctttt

SEQ ID NO: 717 - DNA, 19 bp, Artificial Sequence
  Description of Artificial Sequence: Synthetic oligonucleotide
ttttggttttttccttttt

SEQ ID NO: 718 - DNA, 19 bp, Artificial Sequence
  Description of Artificial Sequence: Synthetic oligonucleotide
tttggttttttcctttttg

SEQ ID NO: 719 - DNA, 19 bp, Artificial Sequence
  Description of Artificial Sequence: Synthetic oligonucleotide
ttggttttttcctttttgt

SEQ ID NO: 720 - DNA, 19 bp, Artificial Sequence
  Description of Artificial Sequence: Synthetic oligonucleotide
tggttttttcctttttgtg

SEQ ID NO: 721 - DNA, 19 bp, Artificial Sequence
  Description of Artificial Sequence: Synthetic oligonucleotide
ggttttttcctttttgtgt

SEQ ID NO: 722 - DNA, 19 bp, Artificial Sequence
  Description of Artificial Sequence: Synthetic oligonucleotide
gttttttcctttttgtgtt

SEQ ID NO: 723 - DNA, 19 bp, Artificial Sequence
  Description of Artificial Sequence: Synthetic oligonucleotide
ttttttcctttttgtgttt

SEQ ID NO: 724 - DNA, 19 bp, Artificial Sequence
  Description of Artificial Sequence: Synthetic oligonucleotide
tttttcctttttgtgtttc

SEQ ID NO: 725 - DNA, 19 bp, Artificial Sequence
  Description of Artificial Sequence: Synthetic oligonucleotide
ttttcctttttgtgtttct

SEQ ID NO: 726 - DNA, 19 bp, Artificial Sequence
  Description of Artificial Sequence: Synthetic oligonucleotide
tttcctttttgtgtttctg

SEQ ID NO: 727 - DNA, 19 bp, Artificial Sequence
  Description of Artificial Sequence: Synthetic oligonucleotide
ttcctttttgtgtttctgt

SEQ ID NO: 728 - DNA, 19 bp, Artificial Sequence
  Description of Artificial Sequence: Synthetic oligonucleotide
tcctttttgtgtttctgtg

SEQ ID NO: 729 - DNA, 19 bp, Artificial Sequence
  Description of Artificial Sequence: Synthetic oligonucleotide
cctttttgtgtttctgtgt

SEQ ID NO: 730 - DNA, 19 bp, Artificial Sequence
  Description of Artificial Sequence: Synthetic oligonucleotide
ctttttgtgtttctgtgtt

SEQ ID NO: 731 - DNA, 19 bp, Artificial Sequence
  Description of Artificial Sequence: Synthetic oligonucleotide
tttttgtgtttctgtgttt

SEQ ID NO: 732 - DNA, 19 bp, Artificial Sequence
  Description of Artificial Sequence: Synthetic oligonucleotide
ttttgtgtttctgtgttta

SEQ ID NO: 733 - DNA, 19 bp, Artificial Sequence
  Description of Artificial Sequence: Synthetic oligonucleotide
tttgtgtttctgtgtttac

SEQ ID NO: 734 - DNA, 19 bp, Artificial Sequence
  Description of Artificial Sequence: Synthetic oligonucleotide
ttgtgtttctgtgtttact

SEQ ID NO: 735 - DNA, 19 bp, Artificial Sequence
  Description of Artificial Sequence: Synthetic oligonucleotide
tgtgtttctgtgtttactc

SEQ ID NO: 736 - DNA, 19 bp, Artificial Sequence
  Description of Artificial Sequence: Synthetic oligonucleotide
gtgtttctgtgtttactca

SEQ ID NO: 737 - DNA, 19 bp, Artificial Sequence
  Description of Artificial Sequence: Synthetic oligonucleotide
tgtttctgtgtttactcag

SEQ ID NO: 738 - DNA, 19 bp, Artificial Sequence
  Description of Artificial Sequence: Synthetic oligonucleotide
gtttctgtgtttactcagc

SEQ ID NO: 739 - DNA, 19 bp, Artificial Sequence
  Description of Artificial Sequence: Synthetic oligonucleotide
tttctgtgtttactcagcc

SEQ ID NO: 740 - DNA, 19 bp, Artificial Sequence
  Description of Artificial Sequence: Synthetic oligonucleotide
ttctgtgtttactcagcct

SEQ ID NO: 741 - DNA, 19 bp, Artificial Sequence
  Description of Artificial Sequence: Synthetic oligonucleotide
tctgtgtttactcagcctt

SEQ ID NO: 742 - DNA, 19 bp, Artificial Sequence
  Description of Artificial Sequence: Synthetic oligonucleotide
ctgtgtttactcagccttc

SEQ ID NO: 743 - DNA, 19 bp, Artificial Sequence
  Description of Artificial Sequence: Synthetic oligonucleotide
tgtgtttactcagccttca

SEQ ID NO: 744 - DNA, 19 bp, Artificial Sequence
  Description of Artificial Sequence: Synthetic oligonucleotide
gtgtttactcagccttcat

SEQ ID NO: 745 - DNA, 19 bp, Artificial Sequence
  Description of Artificial Sequence: Synthetic oligonucleotide
tgtttactcagccttcatt

SEQ ID NO: 746 - DNA, 19 bp, Artificial Sequence
  Description of Artificial Sequence: Synthetic oligonucleotide
gtttactcagccttcattt

SEQ ID NO: 747 - DNA, 19 bp, Artificial Sequence
  Description of Artificial Sequence: Synthetic oligonucleotide
tttactcagccttcatttc

SEQ ID NO: 748 - DNA, 19 bp, Artificial Sequence
  Description of Artificial Sequence: Synthetic oligonucleotide
ttactcagccttcatttca

SEQ ID NO: 749 - DNA, 19 bp, Artificial Sequence
  Description of Artificial Sequence: Synthetic oligonucleotide
tactcagccttcatttcag

SEQ ID NO: 750 - DNA, 19 bp, Artificial Sequence
  Description of Artificial Sequence: Synthetic oligonucleotide
actcagccttcatttcaga

SEQ ID NO: 751 - DNA, 19 bp, Artificial Sequence
  Description of Artificial Sequence: Synthetic oligonucleotide
ctcagccttcatttcagaa

SEQ ID NO: 752 - DNA, 19 bp, Artificial Sequence
  Description of Artificial Sequence: Synthetic oligonucleotide
tcagccttcatttcagaaa

SEQ ID NO: 753 - DNA, 19 bp, Artificial Sequence
  Description of Artificial Sequence: Synthetic oligonucleotide
cagccttcatttcagaaaa

SEQ ID NO: 754 - DNA, 19 bp, Artificial Sequence
  Description of Artificial Sequence: Synthetic oligonucleotide
agccttcatttcagaaaat

SEQ ID NO: 755 - DNA, 19 bp, Artificial Sequence
  Description of Artificial Sequence: Synthetic oligonucleotide
gccttcatttcagaaaatc

SEQ ID NO: 756 - DNA, 19 bp, Artificial Sequence
  Description of Artificial Sequence: Synthetic oligonucleotide
ccttcatttcagaaaatct

SEQ ID NO: 757 - DNA, 19 bp, Artificial Sequence
  Description of Artificial Sequence: Synthetic oligonucleotide
cttcatttcagaaaatctg

SEQ ID NO: 758 - DNA, 19 bp, Artificial Sequence
  Description of Artificial Sequence: Synthetic oligonucleotide
ttcatttcagaaaatctgc

SEQ ID NO: 759 - DNA, 19 bp, Artificial Sequence
  Description of Artificial Sequence: Synthetic oligonucleotide
tcatttcagaaaatctgcc

SEQ ID NO: 760 - DNA, 19 bp, Artificial Sequence
  Description of Artificial Sequence: Synthetic oligonucleotide
catttcagaaaatctgcca

SEQ ID NO: 761 - DNA, 19 bp, Artificial Sequence
  Description of Artificial Sequence: Synthetic oligonucleotide
atttcagaaaatctgccat

SEQ ID NO: 762 - DNA, 19 bp, Artificial Sequence
  Description of Artificial Sequence: Synthetic oligonucleotide
tttcagaaaatctgccatc

SEQ ID NO: 763 - DNA, 19 bp, Artificial Sequence
  Description of Artificial Sequence: Synthetic oligonucleotide
ttcagaaaatctgccatct

SEQ ID NO: 764 - DNA, 19 bp, Artificial Sequence
  Description of Artificial Sequence: Synthetic oligonucleotide
tcagaaaatctgccatctg

SEQ ID NO: 765 - DNA, 19 bp, Artificial Sequence
  Description of Artificial Sequence: Synthetic oligonucleotide
cagaaaatctgccatctgc

SEQ ID NO: 766 - DNA, 19 bp, Artificial Sequence
  Description of Artificial Sequence: Synthetic oligonucleotide
agaaaatctgccatctgct

SEQ ID NO: 767 - DNA, 19 bp, Artificial Sequence
  Description of Artificial Sequence: Synthetic oligonucleotide
gaaaatctgccatctgctt

SEQ ID NO: 768 - DNA, 19 bp, Artificial Sequence
  Description of Artificial Sequence: Synthetic oligonucleotide
aaaatctgccatctgcttc

SEQ ID NO: 769 - DNA, 19 bp, Artificial Sequence
  Description of Artificial Sequence: Synthetic oligonucleotide
aaatctgccatctgcttct

SEQ ID NO: 770 - DNA, 19 bp, Artificial Sequence
  Description of Artificial Sequence: Synthetic oligonucleotide
aatctgccatctgcttctg

SEQ ID NO: 771 - DNA, 19 bp, Artificial Sequence
  Description of Artificial Sequence: Synthetic oligonucleotide
atctgccatctgcttctgg

SEQ ID NO: 772 - DNA, 19 bp, Artificial Sequence
  Description of Artificial Sequence: Synthetic oligonucleotide
tctgccatctgcttctggg

SEQ ID NO: 773 - DNA, 19 bp, Artificial Sequence
  Description of Artificial Sequence: Synthetic oligonucleotide
ctgccatctgcttctggga

SEQ ID NO: 774 - DNA, 19 bp, Artificial Sequence
  Description of Artificial Sequence: Synthetic oligonucleotide
tgccatctgcttctgggat

SEQ ID NO: 775 - DNA, 19 bp, Artificial Sequence
  Description of Artificial Sequence: Synthetic oligonucleotide
gccatctgcttctgggatt

SEQ ID NO: 776 - DNA, 19 bp, Artificial Sequence
  Description of Artificial Sequence: Synthetic oligonucleotide
ccatctgcttctgggattg

SEQ ID NO: 777 - DNA, 19 bp, Artificial Sequence
  Description of Artificial Sequence: Synthetic oligonucleotide
catctgcttctgggattgc

SEQ ID NO: 778 - DNA, 19 bp, Artificial Sequence
  Description of Artificial Sequence: Synthetic oligonucleotide
atctgcttctgggattgct

SEQ ID NO: 779 - DNA, 19 bp, Artificial Sequence
  Description of Artificial Sequence: Synthetic oligonucleotide
tctgcttctgggattgctt

SEQ ID NO: 780 - DNA, 19 bp, Artificial Sequence
  Description of Artificial Sequence: Synthetic oligonucleotide
ctgcttctgggattgctta

SEQ ID NO: 781 - DNA, 19 bp, Artificial Sequence
  Description of Artificial Sequence: Synthetic oligonucleotide
tgcttctgggattgcttaa

SEQ ID NO: 782 - DNA, 19 bp, Artificial Sequence
  Description of Artificial Sequence: Synthetic oligonucleotide
gcttctgggattgcttaag

SEQ ID NO: 783 - DNA, 19 bp, Artificial Sequence
  Description of Artificial Sequence: Synthetic oligonucleotide
cttctgggattgcttaagc

SEQ ID NO: 784 - DNA, 19 bp, Artificial Sequence
  Description of Artificial Sequence: Synthetic oligonucleotide
ttctgggattgcttaagcc

SEQ ID NO: 785 - DNA, 19 bp, Artificial Sequence
  Description of Artificial Sequence: Synthetic oligonucleotide
tctgggattgcttaagccc

SEQ ID NO: 786 - DNA, 19 bp, Artificial Sequence
  Description of Artificial Sequence: Synthetic oligonucleotide
ctgggattgcttaagccct

SEQ ID NO: 787 - DNA, 19 bp, Artificial Sequence
  Description of Artificial Sequence: Synthetic oligonucleotide
tgggattgcttaagccctg

SEQ ID NO: 788 - DNA, 19 bp, Artificial Sequence
  Description of Artificial Sequence: Synthetic oligonucleotide
gggattgcttaagccctgt

SEQ ID NO: 789 - DNA, 19 bp, Artificial Sequence
  Description of Artificial Sequence: Synthetic oligonucleotide
ggattgcttaagccctgtg

SEQ ID NO: 790 - DNA, 19 bp, Artificial Sequence
  Description of Artificial Sequence: Synthetic oligonucleotide
gattgcttaagccctgtgg

SEQ ID NO: 791 - DNA, 19 bp, Artificial Sequence
  Description of Artificial Sequence: Synthetic oligonucleotide
attgcttaagccctgtggg

SEQ ID NO: 792 - DNA, 19 bp, Artificial Sequence
  Description of Artificial Sequence: Synthetic oligonucleotide
ttgcttaagccctgtgggt

SEQ ID NO: 793 - DNA, 19 bp, Artificial Sequence
  Description of Artificial Sequence: Synthetic oligonucleotide
tgcttaagccctgtgggtg

SEQ ID NO: 794 - DNA, 19 bp, Artificial Sequence
  Description of Artificial Sequence: Synthetic oligonucleotide
gcttaagccctgtgggtgt

SEQ ID NO: 795 - DNA, 19 bp, Artificial Sequence
  Description of Artificial Sequence: Synthetic oligonucleotide
cttaagccctgtgggtgtc

SEQ ID NO: 796 - DNA, 19 bp, Artificial Sequence
  Description of Artificial Sequence: Synthetic oligonucleotide
ttaagccctgtgggtgtcc

SEQ ID NO: 797 - DNA, 19 bp, Artificial Sequence
  Description of Artificial Sequence: Synthetic oligonucleotide
taagccctgtgggtgtcct

SEQ ID NO: 798 - DNA, 19 bp, Artificial Sequence
  Description of Artificial Sequence: Synthetic oligonucleotide
aagccctgtgggtgtcctg

SEQ ID NO: 799 - DNA, 19 bp, Artificial Sequence
  Description of Artificial Sequence: Synthetic oligonucleotide
agccctgtgggtgtcctgg

SEQ ID NO: 800 - DNA, 19 bp, Artificial Sequence
  Description of Artificial Sequence: Synthetic oligonucleotide
gccctgtgggtgtcctggt

SEQ ID NO: 801 - DNA, 19 bp, Artificial Sequence
  Description of Artificial Sequence: Synthetic oligonucleotide
ccctgtgggtgtcctggtc

SEQ ID NO: 802 - DNA, 19 bp, Artificial Sequence
  Description of Artificial Sequence: Synthetic oligonucleotide
cctgtgggtgtcctggtca

SEQ ID NO: 803 - DNA, 19 bp, Artificial Sequence
  Description of Artificial Sequence: Synthetic oligonucleotide
ctgtgggtgtcctggtcat

SEQ ID NO: 804 - DNA, 19 bp, Artificial Sequence
  Description of Artificial Sequence: Synthetic oligonucleotide
tgtgggtgtcctggtcatt

SEQ ID NO: 805 - DNA, 19 bp, Artificial Sequence
  Description of Artificial Sequence: Synthetic oligonucleotide
gtgggtgtcctggtcattg

SEQ ID NO: 806 - DNA, 19 bp, Artificial Sequence
  Description of Artificial Sequence: Synthetic oligonucleotide
tgggtgtcctggtcattgg

SEQ ID NO: 807 - DNA, 19 bp, Artificial Sequence
  Description of Artificial Sequence: Synthetic oligonucleotide
gggtgtcctggtcattggt

SEQ ID NO: 808 - DNA, 20 bp, Artificial Sequence
  Description of Artificial Sequence: Synthetic oligonucleotide
cccaactaatctccatttgc

SEQ ID NO: 809 - DNA, 20 bp, Artificial Sequence
  Description of Artificial Sequence: Synthetic oligonucleotide
ccaactaatctccatttgcc

SEQ ID NO: 810 - DNA, 20 bp, Artificial Sequence
  Description of Artificial Sequence: Synthetic oligonucleotide
caactaatctccatttgcca

SEQ ID NO: 811 - DNA, 20 bp, Artificial Sequence
  Description of Artificial Sequence: Synthetic oligonucleotide
aactaatctccatttgccac

SEQ ID NO: 812 - DNA, 20 bp, Artificial Sequence
  Description of Artificial Sequence: Synthetic oligonucleotide
actaatctccatttgccact

SEQ ID NO: 813 - DNA, 20 bp, Artificial Sequence
  Description of Artificial Sequence: Synthetic oligonucleotide
ctaatctccatttgccactg

SEQ ID NO: 814 - DNA, 20 bp, Artificial Sequence
  Description of Artificial Sequence: Synthetic oligonucleotide
taatctccatttgccactga

SEQ ID NO: 815 - DNA, 20 bp, Artificial Sequence
  Description of Artificial Sequence: Synthetic oligonucleotide
aatctccatttgccactgac

SEQ ID NO: 816 - DNA, 20 bp, Artificial Sequence
  Description of Artificial Sequence: Synthetic oligonucleotide
atctccatttgccactgacc

SEQ ID NO: 817 - DNA, 20 bp, Artificial Sequence
  Description of Artificial Sequence: Synthetic oligonucleotide
tctccatttgccactgacca

SEQ ID NO: 818 - DNA, 20 bp, Artificial Sequence
  Description of Artificial Sequence: Synthetic oligonucleotide
ctccatttgccactgaccag

SEQ ID NO: 819 - DNA, 20 bp, Artificial Sequence
  Description of Artificial Sequence: Synthetic oligonucleotide
tccatttgccactgaccagg

SEQ ID NO: 820 - DNA, 20 bp, Artificial Sequence
  Description of Artificial Sequence: Synthetic oligonucleotide
ccatttgccactgaccaggc

SEQ ID NO: 821 - DNA, 20 bp, Artificial Sequence
  Description of Artificial Sequence: Synthetic oligonucleotide
catttgccactgaccaggcc

SEQ ID NO: 822 - DNA, 20 bp, Artificial Sequence
  Description of Artificial Sequence: Synthetic oligonucleotide
atttgccactgaccaggcca

SEQ ID NO: 823 - DNA, 20 bp, Artificial Sequence
  Description of Artificial Sequence: Synthetic oligonucleotide
tttgccactgaccaggccac

SEQ ID NO: 824 - DNA, 20 bp, Artificial Sequence
  Description of Artificial Sequence: Synthetic oligonucleotide
ttgccactgaccaggccaca

SEQ ID NO: 825 - DNA, 20 bp, Artificial Sequence
  Description of Artificial Sequence: Synthetic oligonucleotide
tgccactgaccaggccacag

SEQ ID NO: 826 - DNA, 20 bp, Artificial Sequence
  Description of Artificial Sequence: Synthetic oligonucleotide
gccactgaccaggccacaga

SEQ ID NO: 827 - DNA, 20 bp, Artificial Sequence
  Description of Artificial Sequence: Synthetic oligonucleotide
ccactgaccaggccacagat

SEQ ID NO: 828 - DNA, 20 bp, Artificial Sequence
  Description of Artificial Sequence: Synthetic oligonucleotide
cactgaccaggccacagatg

SEQ ID NO: 829 - DNA, 20 bp, Artificial Sequence
  Description of Artificial Sequence: Synthetic oligonucleotide
actgaccaggccacagatgg

SEQ ID NO: 830 - DNA, 20 bp, Artificial Sequence
  Description of Artificial Sequence: Synthetic oligonucleotide
ctgaccaggccacagatggg

SEQ ID NO: 831 - DNA, 20 bp, Artificial Sequence
  Description of Artificial Sequence: Synthetic oligonucleotide
tgaccaggccacagatgggg

SEQ ID NO: 832 - DNA, 20 bp, Artificial Sequence
  Description of Artificial Sequence: Synthetic oligonucleotide
gaccaggccacagatgggga

SEQ ID NO: 833 - DNA, 20 bp, Artificial Sequence
  Description of Artificial Sequence: Synthetic oligonucleotide
accaggccacagatggggaa

SEQ ID NO: 834 - DNA, 20 bp, Artificial Sequence
  Description of Artificial Sequence: Synthetic oligonucleotide
ccaggccacagatggggaag

SEQ ID NO: 835 - DNA, 20 bp, Artificial Sequence
  Description of Artificial Sequence: Synthetic oligonucleotide
caggccacagatggggaagt

SEQ ID NO: 836 - DNA, 20 bp, Artificial Sequence
  Description of Artificial Sequence: Synthetic oligonucleotide
aggccacagatggggaagtc

SEQ ID NO: 837 - DNA, 20 bp, Artificial Sequence
  Description of Artificial Sequence: Synthetic oligonucleotide
ggccacagatggggaagtca

SEQ ID NO: 838 - DNA, 20 bp, Artificial Sequence
  Description of Artificial Sequence: Synthetic oligonucleotide
gccacagatggggaagtcac

SEQ ID NO: 839 - DNA, 20 bp, Artificial Sequence
  Description of Artificial Sequence: Synthetic oligonucleotide
ccacagatggggaagtcaca

SEQ ID NO: 840 - DNA, 20 bp, Artificial Sequence
  Description of Artificial Sequence: Synthetic oligonucleotide
cacagatggggaagtcacag

SEQ ID NO: 841 - DNA, 20 bp, Artificial Sequence
  Description of Artificial Sequence: Synthetic oligonucleotide
acagatggggaagtcacagc

SEQ ID NO: 842 - DNA, 20 bp, Artificial Sequence
  Description of Artificial Sequence: Synthetic oligonucleotide
cagatggggaagtcacagcc

SEQ ID NO: 843 - DNA, 20 bp, Artificial Sequence
  Description of Artificial Sequence: Synthetic oligonucleotide
agatggggaagtcacagccg

SEQ ID NO: 844 - DNA, 20 bp, Artificial Sequence
  Description of Artificial Sequence: Synthetic oligonucleotide
gatggggaagtcacagccgt

SEQ ID NO: 845 - DNA, 20 bp, Artificial Sequence
  Description of Artificial Sequence: Synthetic oligonucleotide
atggggaagtcacagccgtg

SEQ ID NO: 846 - DNA, 20 bp, Artificial Sequence
  Description of Artificial Sequence: Synthetic oligonucleotide
tggggaagtcacagccgtgg

SEQ ID NO: 847 - DNA, 20 bp, Artificial Sequence
  Description of Artificial Sequence: Synthetic oligonucleotide
ggggaagtcacagccgtgga

SEQ ID NO: 848 - DNA, 20 bp, Artificial Sequence
  Description of Artificial Sequence: Synthetic oligonucleotide
gggaagtcacagccgtggag

SEQ ID NO: 849 - DNA, 20 bp, Artificial Sequence
  Description of Artificial Sequence: Synthetic oligonucleotide
ggaagtcacagccgtggagg

SEQ ID NO: 850 - DNA, 20 bp, Artificial Sequence
  Description of Artificial Sequence: Synthetic oligonucleotide
gaagtcacagccgtggagga

SEQ ID NO: 851 - DNA, 20 bp, Artificial Sequence
  Description of Artificial Sequence: Synthetic oligonucleotide
aagtcacagccgtggaggag

SEQ ID NO: 852 - DNA, 20 bp, Artificial Sequence
  Description of Artificial Sequence: Synthetic oligonucleotide
agtcacagccgtggaggagg

SEQ ID NO: 853 - DNA, 20 bp, Artificial Sequence
  Description of Artificial Sequence: Synthetic oligonucleotide
gtcacagccgtggaggaggc

SEQ ID NO: 854 - DNA, 20 bp, Artificial Sequence
  Description of Artificial Sequence: Synthetic oligonucleotide
tcacagccgtggaggaggca

SEQ ID NO: 855 - DNA, 20 bp, Artificial Sequence
  Description of Artificial Sequence: Synthetic oligonucleotide
cacagccgtggaggaggcac

SEQ ID NO: 856 - DNA, 20 bp, Artificial Sequence
  Description of Artificial Sequence: Synthetic oligonucleotide
acagccgtggaggaggcacc

SEQ ID NO: 857 - DNA, 20 bp, Artificial Sequence
  Description of Artificial Sequence: Synthetic oligonucleotide
cagccgtggaggaggcaccg

SEQ ID NO: 858 - DNA, 20 bp, Artificial Sequence
  Description of Artificial Sequence: Synthetic oligonucleotide
agccgtggaggaggcaccgg

SEQ ID NO: 859 - DNA, 20 bp, Artificial Sequence
  Description of Artificial Sequence: Synthetic oligonucleotide
gccgtggaggaggcaccggt

SEQ ID NO: 860 - DNA, 20 bp, Artificial Sequence
  Description of Artificial Sequence: Synthetic oligonucleotide
ccgtggaggaggcaccggta

SEQ ID NO: 861 - DNA, 20 bp, Artificial Sequence
  Description of Artificial Sequence: Synthetic oligonucleotide
cgtggaggaggcaccggtaa

SEQ ID NO: 862 - DNA, 20 bp, Artificial Sequence
  Description of Artificial Sequence: Synthetic oligonucleotide
gtggaggaggcaccggtaaa

SEQ ID NO: 863 - DNA, 20 bp, Artificial Sequence
  Description of Artificial Sequence: Synthetic oligonucleotide
tggaggaggcaccggtaaat

SEQ ID NO: 864 - DNA, 20 bp, Artificial Sequence
  Description of Artificial Sequence: Synthetic oligonucleotide
ggaggaggcaccggtaaatg

SEQ ID NO: 865 - DNA, 20 bp, Artificial Sequence
  Description of Artificial Sequence: Synthetic oligonucleotide
gaggaggcaccggtaaatgc

SEQ ID NO: 866 - DNA, 20 bp, Artificial Sequence
  Description of Artificial Sequence: Synthetic oligonucleotide
aggaggcaccggtaaatgca

SEQ ID NO: 867 - DNA, 20 bp, Artificial Sequence
  Description of Artificial Sequence: Synthetic oligonucleotide
ggaggcaccggtaaatgcat

SEQ ID NO: 868 - DNA, 20 bp, Artificial Sequence
  Description of Artificial Sequence: Synthetic oligonucleotide
gaggcaccggtaaatgcatg

SEQ ID NO: 869 - DNA, 20 bp, Artificial Sequence
  Description of Artificial Sequence: Synthetic oligonucleotide
aggcaccggtaaatgcatgt

SEQ ID NO: 870 - DNA, 20 bp, Artificial Sequence
  Description of Artificial Sequence: Synthetic oligonucleotide
ggcaccggtaaatgcatgtc

SEQ ID NO: 871 - DNA, 20 bp, Artificial Sequence
  Description of Artificial Sequence: Synthetic oligonucleotide
gcaccggtaaatgcatgtcc

SEQ ID NO: 872 - DNA, 20 bp, Artificial Sequence
  Description of Artificial Sequence: Synthetic oligonucleotide
caccggtaaatgcatgtccc

SEQ ID NO: 873 - DNA, 20 bp, Artificial Sequence
  Description of Artificial Sequence: Synthetic oligonucleotide
accggtaaatgcatgtcccc

SEQ ID NO: 874 - DNA, 20 bp, Artificial Sequence
  Description of Artificial Sequence: Synthetic oligonucleotide
ccggtaaatgcatgtccccc

SEQ ID NO: 875 - DNA, 20 bp, Artificial Sequence
  Description of Artificial Sequence: Synthetic oligonucleotide
cggtaaatgcatgtccccct

SEQ ID NO: 876 - DNA, 20 bp, Artificial Sequence
  Description of Artificial Sequence: Synthetic oligonucleotide
ggtaaatgcatgtccccctg

SEQ ID NO: 877 - DNA, 20 bp, Artificial Sequence
  Description of Artificial Sequence: Synthetic oligonucleotide
gtaaatgcatgtccccctgg

SEQ ID NO: 878 - DNA, 20 bp, Artificial Sequence
  Description of Artificial Sequence: Synthetic oligonucleotide
taaatgcatgtccccctgga

SEQ ID NO: 879 - DNA, 20 bp, Artificial Sequence
  Description of Artificial Sequence: Synthetic oligonucleotide
aaatgcatgtccccctggat

SEQ ID NO: 880 - DNA, 20 bp, Artificial Sequence
  Description of Artificial Sequence: Synthetic oligonucleotide
aatgcatgtccccctggatt

SEQ ID NO: 881 - DNA, 20 bp, Artificial Sequence
  Description of Artificial Sequence: Synthetic oligonucleotide
atgcatgtccccctggattc

SEQ ID NO: 882 - DNA, 20 bp, Artificial Sequence
  Description of Artificial Sequence: Synthetic oligonucleotide
tgcatgtccccctggattca

SEQ ID NO: 883 - DNA, 20 bp, Artificial Sequence
  Description of Artificial Sequence: Synthetic oligonucleotide
gcatgtccccctggattcag

SEQ ID NO: 884 - DNA, 20 bp, Artificial Sequence
  Description of Artificial Sequence: Synthetic oligonucleotide
catgtccccctggattcagg

SEQ ID NO: 885 - DNA, 20 bp, Artificial Sequence
  Description of Artificial Sequence: Synthetic oligonucleotide
atgtccccctggattcaggc

SEQ ID NO: 886 - DNA, 20 bp, Artificial Sequence
  Description of Artificial Sequence: Synthetic oligonucleotide
tgtccccctggattcaggcc

SEQ ID NO: 887 - DNA, 20 bp, Artificial Sequence
  Description of Artificial Sequence: Synthetic oligonucleotide
gtccccctggattcaggccc

SEQ ID NO: 888 - DNA, 20 bp, Artificial Sequence
  Description of Artificial Sequence: Synthetic oligonucleotide
tccccctggattcaggccct

SEQ ID NO: 889 - DNA, 20 bp, Artificial Sequence
  Description of Artificial Sequence: Synthetic oligonucleotide
ccccctggattcaggccctg

SEQ ID NO: 890 - DNA, 20 bp, Artificial Sequence
  Description of Artificial Sequence: Synthetic oligonucleotide
cccctggattcaggccctgg

SEQ ID NO: 891 - DNA, 20 bp, Artificial Sequence
  Description of Artificial Sequence: Synthetic oligonucleotide
ccctggattcaggccctggg

SEQ ID NO: 892 - DNA, 20 bp, Artificial Sequence
  Description of Artificial Sequence: Synthetic oligonucleotide
cctggattcaggccctgggt

SEQ ID NO: 893 - DNA, 20 bp, Artificial Sequence
  Description of Artificial Sequence: Synthetic oligonucleotide
ctggattcaggccctgggta

SEQ ID NO: 894 - DNA, 20 bp, Artificial Sequence
  Description of Artificial Sequence: Synthetic oligonucleotide
tggattcaggccctgggtac

SEQ ID NO: 895 - DNA, 20 bp, Artificial Sequence
  Description of Artificial Sequence: Synthetic oligonucleotide
ggattcaggccctgggtaca

SEQ ID NO: 896 - DNA, 20 bp, Artificial Sequence
  Description of Artificial Sequence: Synthetic oligonucleotide
gattcaggccctgggtacaa

SEQ ID NO: 897 - DNA, 20 bp, Artificial Sequence
  Description of Artificial Sequence: Synthetic oligonucleotide
attcaggccctgggtacaat

SEQ ID NO: 898 - DNA, 20 bp, Artificial Sequence
  Description of Artificial Sequence: Synthetic oligonucleotide
ttcaggccctgggtacaatt

SEQ ID NO: 899 - DNA, 20 bp, Artificial Sequence
  Description of Artificial Sequence: Synthetic oligonucleotide
tcaggccctgggtacaattt

SEQ ID NO: 900 - DNA, 20 bp, Artificial Sequence
  Description of Artificial Sequence: Synthetic oligonucleotide
caggccctgggtacaatttt

SEQ ID NO: 901 - DNA, 20 bp, Artificial Sequence
  Description of Artificial Sequence: Synthetic oligonucleotide
aggccctgggtacaattttg

SEQ ID NO: 902 - DNA, 20 bp, Artificial Sequence
  Description of Artificial Sequence: Synthetic oligonucleotide
ggccctgggtacaattttgg

SEQ ID NO: 903 - DNA, 20 bp, Artificial Sequence
  Description of Artificial Sequence: Synthetic oligonucleotide
gccctgggtacaattttggt

SEQ ID NO: 904 - DNA, 20 bp, Artificial Sequence
  Description of Artificial Sequence: Synthetic oligonucleotide
ccctgggtacaattttggtt

SEQ ID NO: 905 - DNA, 20 bp, Artificial Sequence
  Description of Artificial Sequence: Synthetic oligonucleotide
cctgggtacaattttggttt

SEQ ID NO: 906 - DNA, 20 bp, Artificial Sequence
  Description of Artificial Sequence: Synthetic oligonucleotide
ctgggtacaattttggtttt

SEQ ID NO: 907 - DNA, 20 bp, Artificial Sequence
  Description of Artificial Sequence: Synthetic oligonucleotide
tgggtacaattttggttttt

SEQ ID NO: 908 - DNA, 20 bp, Artificial Sequence
  Description of Artificial Sequence: Synthetic oligonucleotide
gggtacaattttggtttttt

SEQ ID NO: 909 - DNA, 20 bp, Artificial Sequence
  Description of Artificial Sequence: Synthetic oligonucleotide
ggtacaattttggttttttc

SEQ ID NO: 910 - DNA, 20 bp, Artificial Sequence
  Description of Artificial Sequence: Synthetic oligonucleotide
gtacaattttggttttttcc

SEQ ID NO: 911 - DNA, 20 bp, Artificial Sequence
  Description of Artificial Sequence: Synthetic oligonucleotide
tacaattttggttttttcct

SEQ ID NO: 912 - DNA, 20 bp, Artificial Sequence
  Description of Artificial Sequence: Synthetic oligonucleotide
acaattttggttttttcctt

SEQ ID NO: 913 - DNA, 20 bp, Artificial Sequence
  Description of Artificial Sequence: Synthetic oligonucleotide
caattttggttttttccttt

SEQ ID NO: 914 - DNA, 20 bp, Artificial Sequence
  Description of Artificial Sequence: Synthetic oligonucleotide
aattttggttttttcctttt

SEQ ID NO: 915 - DNA, 20 bp, Artificial Sequence
  Description of Artificial Sequence: Synthetic oligonucleotide
attttggttttttccttttt

SEQ ID NO: 916 - DNA, 20 bp, Artificial Sequence
  Description of Artificial Sequence: Synthetic oligonucleotide
ttttggttttttcctttttg

SEQ ID NO: 917 - DNA, 20 bp, Artificial Sequence
  Description of Artificial Sequence: Synthetic oligonucleotide
tttggttttttcctttttgt

SEQ ID NO: 918 - DNA, 20 bp, Artificial Sequence
  Description of Artificial Sequence: Synthetic oligonucleotide
ttggttttttcctttttgtg

SEQ ID NO: 919 - DNA, 20 bp, Artificial Sequence
  Description of Artificial Sequence: Synthetic oligonucleotide
tggttttttcctttttgtgt

SEQ ID NO: 920 - DNA, 20 bp, Artificial Sequence
  Description of Artificial Sequence: Synthetic oligonucleotide
ggttttttcctttttgtgtt

SEQ ID NO: 921 - DNA, 20 bp, Artificial Sequence
  Description of Artificial Sequence: Synthetic oligonucleotide
gttttttcctttttgtgttt

SEQ ID NO: 922 - DNA, 20 bp, Artificial Sequence
  Description of Artificial Sequence: Synthetic oligonucleotide
ttttttcctttttgtgtttc

SEQ ID NO: 923 - DNA, 20 bp, Artificial Sequence
  Description of Artificial Sequence: Synthetic oligonucleotide
tttttcctttttgtgtttct

SEQ ID NO: 924 - DNA, 20 bp, Artificial Sequence
  Description of Artificial Sequence: Synthetic oligonucleotide
ttttcctttttgtgtttctg

SEQ ID NO: 925 - DNA, 20 bp, Artificial Sequence
  Description of Artificial Sequence: Synthetic oligonucleotide
tttcctttttgtgtttctgt

SEQ ID NO: 926 - DNA, 20 bp, Artificial Sequence
  Description of Artificial Sequence: Synthetic oligonucleotide
ttcctttttgtgtttctgtg

SEQ ID NO: 927 - DNA, 20 bp, Artificial Sequence
  Description of Artificial Sequence: Synthetic oligonucleotide
tcctttttgtgtttctgtgt

SEQ ID NO: 928 - DNA, 20 bp, Artificial Sequence
  Description of Artificial Sequence: Synthetic oligonucleotide
cctttttgtgtttctgtgtt

SEQ ID NO: 929 - DNA, 20 bp, Artificial Sequence
  Description of Artificial Sequence: Synthetic oligonucleotide
ctttttgtgtttctgtgttt

SEQ ID NO: 930 - DNA, 20 bp, Artificial Sequence
  Description of Artificial Sequence: Synthetic oligonucleotide
tttttgtgtttctgtgttta

SEQ ID NO: 931 - DNA, 20 bp, Artificial Sequence
  Description of Artificial Sequence: Synthetic oligonucleotide
ttttgtgtttctgtgtttac

SEQ ID NO: 932 - DNA, 20 bp, Artificial Sequence
  Description of Artificial Sequence: Synthetic oligonucleotide
tttgtgtttctgtgtttact

SEQ ID NO: 933 - DNA, 20 bp, Artificial Sequence
  Description of Artificial Sequence: Synthetic oligonucleotide
ttgtgtttctgtgtttactc

SEQ ID NO: 934 - DNA, 20 bp, Artificial Sequence
  Description of Artificial Sequence: Synthetic oligonucleotide
tgtgtttctgtgtttactca

SEQ ID NO: 935 - DNA, 20 bp, Artificial Sequence
  Description of Artificial Sequence: Synthetic oligonucleotide
gtgtttctgtgtttactcag

SEQ ID NO: 936 - DNA, 20 bp, Artificial Sequence
  Description of Artificial Sequence: Synthetic oligonucleotide
tgtttctgtgtttactcagc

SEQ ID NO: 937 - DNA, 20 bp, Artificial Sequence
  Description of Artificial Sequence: Synthetic oligonucleotide
gtttctgtgtttactcagcc

SEQ ID NO: 938 - DNA, 20 bp, Artificial Sequence
  Description of Artificial Sequence: Synthetic oligonucleotide
tttctgtgtttactcagcct

SEQ ID NO: 939 - DNA, 20 bp, Artificial Sequence
  Description of Artificial Sequence: Synthetic oligonucleotide
ttctgtgtttactcagcctt

SEQ ID NO: 940 - DNA, 20 bp, Artificial Sequence
  Description of Artificial Sequence: Synthetic oligonucleotide
tctgtgtttactcagccttc

SEQ ID NO: 941 - DNA, 20 bp, Artificial Sequence
  Description of Artificial Sequence: Synthetic oligonucleotide
ctgtgtttactcagccttca

SEQ ID NO: 942 - DNA, 20 bp, Artificial Sequence
  Description of Artificial Sequence: Synthetic oligonucleotide
tgtgtttactcagccttcat

SEQ ID NO: 943 - DNA, 20 bp, Artificial Sequence
  Description of Artificial Sequence: Synthetic oligonucleotide
gtgtttactcagccttcatt

SEQ ID NO: 944 - DNA, 20 bp, Artificial Sequence
  Description of Artificial Sequence: Synthetic oligonucleotide
tgtttactcagccttcattt

SEQ ID NO: 945 - DNA, 20 bp, Artificial Sequence
  Description of Artificial Sequence: Synthetic oligonucleotide
gtttactcagccttcatttc

SEQ ID NO: 946 - DNA, 20 bp, Artificial Sequence
  Description of Artificial Sequence: Synthetic oligonucleotide
tttactcagccttcatttca

SEQ ID NO: 947 - DNA, 20 bp, Artificial Sequence
  Description of Artificial Sequence: Synthetic oligonucleotide
ttactcagccttcatttcag

SEQ ID NO: 948 - DNA, 20 bp, Artificial Sequence
  Description of Artificial Sequence: Synthetic oligonucleotide
tactcagccttcatttcaga

SEQ ID NO: 949 - DNA, 20 bp, Artificial Sequence
  Description of Artificial Sequence: Synthetic oligonucleotide
actcagccttcatttcagaa

SEQ ID NO: 950 - DNA, 20 bp, Artificial Sequence
  Description of Artificial Sequence: Synthetic oligonucleotide
ctcagccttcatttcagaaa

SEQ ID NO: 951 - DNA, 20 bp, Artificial Sequence
  Description of Artificial Sequence: Synthetic oligonucleotide
tcagccttcatttcagaaaa

SEQ ID NO: 952 - DNA, 20 bp, Artificial Sequence
  Description of Artificial Sequence: Synthetic oligonucleotide
cagccttcatttcagaaaat

SEQ ID NO: 953 - DNA, 20 bp, Artificial Sequence
  Description of Artificial Sequence: Synthetic oligonucleotide
agccttcatttcagaaaatc

SEQ ID NO: 954 - DNA, 20 bp, Artificial Sequence
  Description of Artificial Sequence: Synthetic oligonucleotide
gccttcatttcagaaaatct

SEQ ID NO: 955 - DNA, 20 bp, Artificial Sequence
  Description of Artificial Sequence: Synthetic oligonucleotide
ccttcatttcagaaaatctg

SEQ ID NO: 956 - DNA, 20 bp, Artificial Sequence
  Description of Artificial Sequence: Synthetic oligonucleotide
cttcatttcagaaaatctgc

SEQ ID NO: 957 - DNA, 20 bp, Artificial Sequence
  Description of Artificial Sequence: Synthetic oligonucleotide
ttcatttcagaaaatctgcc

SEQ ID NO: 958 - DNA, 20 bp, Artificial Sequence
  Description of Artificial Sequence: Synthetic oligonucleotide
tcatttcagaaaatctgcca

SEQ ID NO: 959 - DNA, 20 bp, Artificial Sequence
  Description of Artificial Sequence: Synthetic oligonucleotide
catttcagaaaatctgccat

SEQ ID NO: 960 - DNA, 20 bp, Artificial Sequence
  Description of Artificial Sequence: Synthetic oligonucleotide
atttcagaaaatctgccatc

SEQ ID NO: 961 - DNA, 20 bp, Artificial Sequence
  Description of Artificial Sequence: Synthetic oligonucleotide
tttcagaaaatctgccatct

SEQ ID NO: 962 - DNA, 20 bp, Artificial Sequence
  Description of Artificial Sequence: Synthetic oligonucleotide
ttcagaaaatctgccatctg

SEQ ID NO: 963 - DNA, 20 bp, Artificial Sequence
  Description of Artificial Sequence: Synthetic oligonucleotide
tcagaaaatctgccatctgc

SEQ ID NO: 964 - DNA, 20 bp, Artificial Sequence
  Description of Artificial Sequence: Synthetic oligonucleotide
cagaaaatctgccatctgct

SEQ ID NO: 965 - DNA, 20 bp, Artificial Sequence
  Description of Artificial Sequence: Synthetic oligonucleotide
agaaaatctgccatctgctt

SEQ ID NO: 966 - DNA, 20 bp, Artificial Sequence
  Description of Artificial Sequence: Synthetic oligonucleotide
gaaaatctgccatctgcttc

SEQ ID NO: 967 - DNA, 20 bp, Artificial Sequence
  Description of Artificial Sequence: Synthetic oligonucleotide
aaaatctgccatctgcttct

SEQ ID NO: 968 - DNA, 20 bp, Artificial Sequence
  Description of Artificial Sequence: Synthetic oligonucleotide
aaatctgccatctgcttctg

SEQ ID NO: 969 - DNA, 20 bp, Artificial Sequence
  Description of Artificial Sequence: Synthetic oligonucleotide
aatctgccatctgcttctgg

SEQ ID NO: 970 - DNA, 20 bp, Artificial Sequence
  Description of Artificial Sequence: Synthetic oligonucleotide
atctgccatctgcttctggg

SEQ ID NO: 971 - DNA, 20 bp, Artificial Sequence
  Description of Artificial Sequence: Synthetic oligonucleotide
tctgccatctgcttctggga

SEQ ID NO: 972 - DNA, 20 bp, Artificial Sequence
  Description of Artificial Sequence: Synthetic oligonucleotide
ctgccatctgcttctgggat

SEQ ID NO: 973 - DNA, 20 bp, Artificial Sequence
  Description of Artificial Sequence: Synthetic oligonucleotide
tgccatctgcttctgggatt

SEQ ID NO: 974 - DNA, 20 bp, Artificial Sequence
  Description of Artificial Sequence: Synthetic oligonucleotide
gccatctgcttctgggattg

SEQ ID NO: 975 - DNA, 20 bp, Artificial Sequence
  Description of Artificial Sequence: Synthetic oligonucleotide
ccatctgcttctgggattgc

SEQ ID NO: 976 - DNA, 20 bp, Artificial Sequence
  Description of Artificial Sequence: Synthetic oligonucleotide
catctgcttctgggattgct

SEQ ID NO: 977 - DNA, 20 bp, Artificial Sequence
  Description of Artificial Sequence: Synthetic oligonucleotide
atctgcttctgggattgctt

SEQ ID NO: 978 - DNA, 20 bp, Artificial Sequence
  Description of Artificial Sequence: Synthetic oligonucleotide
tctgcttctgggattgctta

SEQ ID NO: 979 - DNA, 20 bp, Artificial Sequence
  Description of Artificial Sequence: Synthetic oligonucleotide
ctgcttctgggattgcttaa

SEQ ID NO: 980 - DNA, 20 bp, Artificial Sequence
  Description of Artificial Sequence: Synthetic oligonucleotide
tgcttctgggattgcttaag

SEQ ID NO: 981 - DNA, 20 bp, Artificial Sequence
  Description of Artificial Sequence: Synthetic oligonucleotide
gcttctgggattgcttaagc

SEQ ID NO: 982 - DNA, 20 bp, Artificial Sequence
  Description of Artificial Sequence: Synthetic oligonucleotide
cttctgggattgcttaagcc

SEQ ID NO: 983 - DNA, 20 bp, Artificial Sequence
  Description of Artificial Sequence: Synthetic oligonucleotide
ttctgggattgcttaagccc

SEQ ID NO: 984 - DNA, 20 bp, Artificial Sequence
  Description of Artificial Sequence: Synthetic oligonucleotide
tctgggattgcttaagccct

SEQ ID NO: 985 - DNA, 20 bp, Artificial Sequence
  Description of Artificial Sequence: Synthetic oligonucleotide
ctgggattgcttaagccctg

SEQ ID NO: 986 - DNA, 20 bp, Artificial Sequence
  Description of Artificial Sequence: Synthetic oligonucleotide
tgggattgcttaagccctgt

SEQ ID NO: 987 - DNA, 20 bp, Artificial Sequence
  Description of Artificial Sequence: Synthetic oligonucleotide
gggattgcttaagccctgtg

SEQ ID NO: 988 - DNA, 20 bp, Artificial Sequence
  Description of Artificial Sequence: Synthetic oligonucleotide
ggattgcttaagccctgtgg

SEQ ID NO: 989 - DNA, 20 bp, Artificial Sequence
  Description of Artificial Sequence: Synthetic oligonucleotide
gattgcttaagccctgtggg

SEQ ID NO: 990 - DNA, 20 bp, Artificial Sequence
  Description of Artificial Sequence: Synthetic oligonucleotide
attgcttaagccctgtgggt

SEQ ID NO: 991 - DNA, 20 bp, Artificial Sequence
  Description of Artificial Sequence: Synthetic oligonucleotide
ttgcttaagccctgtgggtg

SEQ ID NO: 992 - DNA, 20 bp, Artificial Sequence
  Description of Artificial Sequence: Synthetic oligonucleotide
tgcttaagccctgtgggtgt

SEQ ID NO: 993 - DNA, 20 bp, Artificial Sequence
  Description of Artificial Sequence: Synthetic oligonucleotide
gcttaagccctgtgggtgtc

SEQ ID NO: 994 - DNA, 20 bp, Artificial Sequence
  Description of Artificial Sequence: Synthetic oligonucleotide
cttaagccctgtgggtgtcc

SEQ ID NO: 995 - DNA, 20 bp, Artificial Sequence
  Description of Artificial Sequence: Synthetic oligonucleotide
ttaagccctgtgggtgtcct

SEQ ID NO: 996 - DNA, 20 bp, Artificial Sequence
  Description of Artificial Sequence: Synthetic oligonucleotide
taagccctgtgggtgtcctg

SEQ ID NO: 997 - DNA, 20 bp, Artificial Sequence
  Description of Artificial Sequence: Synthetic oligonucleotide
aagccctgtgggtgtcctgg

SEQ ID NO: 998 - DNA, 20 bp, Artificial Sequence
  Description of Artificial Sequence: Synthetic oligonucleotide
agccctgtgggtgtcctggt

SEQ ID NO: 999 - DNA, 20 bp, Artificial Sequence
  Description of Artificial Sequence: Synthetic oligonucleotide
gccctgtgggtgtcctggtc

SEQ ID NO: 1000 - DNA, 20 bp, Artificial Sequence
  Description of Artificial Sequence: Synthetic oligonucleotide
ccctgtgggtgtcctggtca

SEQ ID NO: 1001 - DNA, 20 bp, Artificial Sequence
  Description of Artificial Sequence: Synthetic oligonucleotide
cctgtgggtgtcctggtcat

SEQ ID NO: 1002 - DNA, 20 bp, Artificial Sequence
  Description of Artificial Sequence: Synthetic oligonucleotide
ctgtgggtgtcctggtcatt

SEQ ID NO: 1003 - DNA, 20 bp, Artificial Sequence
  Description of Artificial Sequence: Synthetic oligonucleotide
tgtgggtgtcctggtcattg

SEQ ID NO: 1004 - DNA, 20 bp, Artificial Sequence
  Description of Artificial Sequence: Synthetic oligonucleotide
gtgggtgtcctggtcattgg

SEQ ID NO: 1005 - DNA, 20 bp, Artificial Sequence
  Description of Artificial Sequence: Synthetic oligonucleotide
tgggtgtcctggtcattggt

SEQ ID NO: 1006 - DNA, 21 bp, Artificial Sequence
  Description of Artificial Sequence: Synthetic oligonucleotide
cccaactaatctccatttgcc

SEQ ID NO: 1007 - DNA, 21 bp, Artificial Sequence
  Description of Artificial Sequence: Synthetic oligonucleotide
ccaactaatctccatttgcca

SEQ ID NO: 1008 - DNA, 21 bp, Artificial Sequence
  Description of Artificial Sequence: Synthetic oligonucleotide
caactaatctccatttgccac

SEQ ID NO: 1009 - DNA, 21 bp, Artificial Sequence
  Description of Artificial Sequence: Synthetic oligonucleotide
aactaatctccatttgccact

SEQ ID NO: 1010 - DNA, 21 bp, Artificial Sequence
  Description of Artificial Sequence: Synthetic oligonucleotide
actaatctccatttgccactg

SEQ ID NO: 1011 - DNA, 21 bp, Artificial Sequence
  Description of Artificial Sequence: Synthetic oligonucleotide
ctaatctccatttgccactga

SEQ ID NO: 1012 - DNA, 21 bp, Artificial Sequence
  Description of Artificial Sequence: Synthetic oligonucleotide
taatctccatttgccactgac

SEQ ID NO: 1013 - DNA, 21 bp, Artificial Sequence
  Description of Artificial Sequence: Synthetic oligonucleotide
aatctccatttgccactgacc

SEQ ID NO: 1014 - DNA, 21 bp, Artificial Sequence
  Description of Artificial Sequence: Synthetic oligonucleotide
atctccatttgccactgacca

SEQ ID NO: 1015 - DNA, 21 bp, Artificial Sequence
  Description of Artificial Sequence: Synthetic oligonucleotide
tctccatttgccactgaccag

SEQ ID NO: 1016 - DNA, 21 bp, Artificial Sequence
  Description of Artificial Sequence: Synthetic oligonucleotide
ctccatttgccactgaccagg

SEQ ID NO: 1017 - DNA, 21 bp, Artificial Sequence
  Description of Artificial Sequence: Synthetic oligonucleotide
tccatttgccactgaccaggc

SEQ ID NO: 1018 - DNA, 21 bp, Artificial Sequence
  Description of Artificial Sequence: Synthetic oligonucleotide
ccatttgccactgaccaggcc

SEQ ID NO: 1019 - DNA, 21 bp, Artificial Sequence
  Description of Artificial Sequence: Synthetic oligonucleotide
catttgccactgaccaggcca

SEQ ID NO: 1020 - DNA, 21 bp, Artificial Sequence
  Description of Artificial Sequence: Synthetic oligonucleotide
atttgccactgaccaggccac

SEQ ID NO: 1021 - DNA, 21 bp, Artificial Sequence
  Description of Artificial Sequence: Synthetic oligonucleotide
tttgccactgaccaggccaca

SEQ ID NO: 1022 - DNA, 21 bp, Artificial Sequence
  Description of Artificial Sequence: Synthetic oligonucleotide
ttgccactgaccaggccacag

SEQ ID NO: 1023 - DNA, 21 bp, Artificial Sequence
  Description of Artificial Sequence: Synthetic oligonucleotide
tgccactgaccaggccacaga

SEQ ID NO: 1024 - DNA, 21 bp, Artificial Sequence
  Description of Artificial Sequence: Synthetic oligonucleotide
gccactgaccaggccacagat

SEQ ID NO: 1025 - DNA, 21 bp, Artificial Sequence
  Description of Artificial Sequence: Synthetic oligonucleotide
ccactgaccaggccacagatg

SEQ ID NO: 1026 - DNA, 21 bp, Artificial Sequence
  Description of Artificial Sequence: Synthetic oligonucleotide
cactgaccaggccacagatgg

SEQ ID NO: 1027 - DNA, 21 bp, Artificial Sequence
  Description of Artificial Sequence: Synthetic oligonucleotide
actgaccaggccacagatggg

SEQ ID NO: 1028 - DNA, 21 bp, Artificial Sequence
  Description of Artificial Sequence: Synthetic oligonucleotide
ctgaccaggccacagatgggg

SEQ ID NO: 1029 - DNA, 21 bp, Artificial Sequence
  Description of Artificial Sequence: Synthetic oligonucleotide
tgaccaggccacagatgggga

SEQ ID NO: 1030 - DNA, 21 bp, Artificial Sequence
  Description of Artificial Sequence: Synthetic oligonucleotide
gaccaggccacagatggggaa

SEQ ID NO: 1031 - DNA, 21 bp, Artificial Sequence
  Description of Artificial Sequence: Synthetic oligonucleotide
accaggccacagatggggaag

SEQ ID NO: 1032 - DNA, 21 bp, Artificial Sequence
  Description of Artificial Sequence: Synthetic oligonucleotide
ccaggccacagatggggaagt

SEQ ID NO: 1033 - DNA, 21 bp, Artificial Sequence
  Description of Artificial Sequence: Synthetic oligonucleotide
caggccacagatggggaagtc

SEQ ID NO: 1034 - DNA, 21 bp, Artificial Sequence
  Description of Artificial Sequence: Synthetic oligonucleotide
aggccacagatggggaagtca

SEQ ID NO: 1035 - DNA, 21 bp, Artificial Sequence
  Description of Artificial Sequence: Synthetic oligonucleotide
ggccacagatggggaagtcac

SEQ ID NO: 1036 - DNA, 21 bp, Artificial Sequence
  Description of Artificial Sequence: Synthetic oligonucleotide
gccacagatggggaagtcaca

SEQ ID NO: 1037 - DNA, 21 bp, Artificial Sequence
  Description of Artificial Sequence: Synthetic oligonucleotide
ccacagatggggaagtcacag

SEQ ID NO: 1038 - DNA, 21 bp, Artificial Sequence
  Description of Artificial Sequence: Synthetic oligonucleotide
cacagatggggaagtcacagc

SEQ ID NO: 1039 - DNA, 21 bp, Artificial Sequence
  Description of Artificial Sequence: Synthetic oligonucleotide
acagatggggaagtcacagcc

SEQ ID NO: 1040 - DNA, 21 bp, Artificial Sequence
  Description of Artificial Sequence: Synthetic oligonucleotide
cagatggggaagtcacagccg

SEQ ID NO: 1041 - DNA, 21 bp, Artificial Sequence
  Description of Artificial Sequence: Synthetic oligonucleotide
agatggggaagtcacagccgt

SEQ ID NO: 1042 - DNA, 21 bp, Artificial Sequence
  Description of Artificial Sequence: Synthetic oligonucleotide
gatggggaagtcacagccgtg

SEQ ID NO: 1043 - DNA, 21 bp, Artificial Sequence
  Description of Artificial Sequence: Synthetic oligonucleotide
atggggaagtcacagccgtgg

SEQ ID NO: 1044 - DNA, 21 bp, Artificial Sequence
  Description of Artificial Sequence: Synthetic oligonucleotide
tggggaagtcacagccgtgga

SEQ ID NO: 1045 - DNA, 21 bp, Artificial Sequence
  Description of Artificial Sequence: Synthetic oligonucleotide
ggggaagtcacagccgtggag

SEQ ID NO: 1046 - DNA, 21 bp, Artificial Sequence
  Description of Artificial Sequence: Synthetic oligonucleotide
gggaagtcacagccgtggagg

SEQ ID NO: 1047 - DNA, 21 bp, Artificial Sequence
  Description of Artificial Sequence: Synthetic oligonucleotide
ggaagtcacagccgtggagga

SEQ ID NO: 1048 - DNA, 21 bp, Artificial Sequence
  Description of Artificial Sequence: Synthetic oligonucleotide
gaagtcacagccgtggaggag

SEQ ID NO: 1049 - DNA, 21 bp, Artificial Sequence
  Description of Artificial Sequence: Synthetic oligonucleotide
aagtcacagccgtggaggagg

SEQ ID NO: 1050 - DNA, 21 bp, Artificial Sequence
  Description of Artificial Sequence: Synthetic oligonucleotide
agtcacagccgtggaggaggc

SEQ ID NO: 1051 - DNA, 21 bp, Artificial Sequence
  Description of Artificial Sequence: Synthetic oligonucleotide
gtcacagccgtggaggaggca

SEQ ID NO: 1052 - DNA, 21 bp, Artificial Sequence
  Description of Artificial Sequence: Synthetic oligonucleotide
tcacagccgtggaggaggcac

SEQ ID NO: 1053 - DNA, 21 bp, Artificial Sequence
  Description of Artificial Sequence: Synthetic oligonucleotide
cacagccgtggaggaggcacc

SEQ ID NO: 1054 - DNA, 21 bp, Artificial Sequence
  Description of Artificial Sequence: Synthetic oligonucleotide
acagccgtggaggaggcaccg

SEQ ID NO: 1055 - DNA, 21 bp, Artificial Sequence
  Description of Artificial Sequence: Synthetic oligonucleotide
cagccgtggaggaggcaccgg

SEQ ID NO: 1056 - DNA, 21 bp, Artificial Sequence
  Description of Artificial Sequence: Synthetic oligonucleotide
agccgtggaggaggcaccggt

SEQ ID NO: 1057 - DNA, 21 bp, Artificial Sequence
  Description of Artificial Sequence: Synthetic oligonucleotide
gccgtggaggaggcaccggta

SEQ ID NO: 1058 - DNA, 21 bp, Artificial Sequence
  Description of Artificial Sequence: Synthetic oligonucleotide
ccgtggaggaggcaccggtaa

SEQ ID NO: 1059 - DNA, 21 bp, Artificial Sequence
  Description of Artificial Sequence: Synthetic oligonucleotide
cgtggaggaggcaccggtaaa

SEQ ID NO: 1060 - DNA, 21 bp, Artificial Sequence
  Description of Artificial Sequence: Synthetic oligonucleotide
gtggaggaggcaccggtaaat

SEQ ID NO: 1061 - DNA, 21 bp, Artificial Sequence
  Description of Artificial Sequence: Synthetic oligonucleotide
tggaggaggcaccggtaaatg

SEQ ID NO: 1062 - DNA, 21 bp, Artificial Sequence
  Description of Artificial Sequence: Synthetic oligonucleotide
ggaggaggcaccggtaaatgc

SEQ ID NO: 1063 - DNA, 21 bp, Artificial Sequence
  Description of Artificial Sequence: Synthetic oligonucleotide
gaggaggcaccggtaaatgca

SEQ ID NO: 1064 - DNA, 21 bp, Artificial Sequence
  Description of Artificial Sequence: Synthetic oligonucleotide
aggaggcaccggtaaatgcat

SEQ ID NO: 1065 - DNA, 21 bp, Artificial Sequence
  Description of Artificial Sequence: Synthetic oligonucleotide
ggaggcaccggtaaatgcatg

SEQ ID NO: 1066 - DNA, 21 bp, Artificial Sequence
  Description of Artificial Sequence: Synthetic oligonucleotide
gaggcaccggtaaatgcatgt

SEQ ID NO: 1067 - DNA, 21 bp, Artificial Sequence
  Description of Artificial Sequence: Synthetic oligonucleotide
aggcaccggtaaatgcatgtc

SEQ ID NO: 1068 - DNA, 21 bp, Artificial Sequence
  Description of Artificial Sequence: Synthetic oligonucleotide
ggcaccggtaaatgcatgtcc

SEQ ID NO: 1069 - DNA, 21 bp, Artificial Sequence
  Description of Artificial Sequence: Synthetic oligonucleotide
gcaccggtaaatgcatgtccc

SEQ ID NO: 1070 - DNA, 21 bp, Artificial Sequence
  Description of Artificial Sequence: Synthetic oligonucleotide
caccggtaaatgcatgtcccc

SEQ ID NO: 1071 - DNA, 21 bp, Artificial Sequence
  Description of Artificial Sequence: Synthetic oligonucleotide
accggtaaatgcatgtccccc

SEQ ID NO: 1072 - DNA, 21 bp, Artificial Sequence
  Description of Artificial Sequence: Synthetic oligonucleotide
ccggtaaatgcatgtccccct

SEQ ID NO: 1073 - DNA, 21 bp, Artificial Sequence
  Description of Artificial Sequence: Synthetic oligonucleotide
cggtaaatgcatgtccccctg

SEQ ID NO: 1074 - DNA, 21 bp, Artificial Sequence
  Description of Artificial Sequence: Synthetic oligonucleotide
ggtaaatgcatgtccccctgg

SEQ ID NO: 1075 - DNA, 21 bp, Artificial Sequence
  Description of Artificial Sequence: Synthetic oligonucleotide
gtaaatgcatgtccccctgga

SEQ ID NO: 1076 - DNA, 21 bp, Artificial Sequence
  Description of Artificial Sequence: Synthetic oligonucleotide
taaatgcatgtccccctggat

SEQ ID NO: 1077 - DNA, 21 bp, Artificial Sequence
  Description of Artificial Sequence: Synthetic oligonucleotide
aaatgcatgtccccctggatt

SEQ ID NO: 1078 - DNA, 21 bp, Artificial Sequence
  Description of Artificial Sequence: Synthetic oligonucleotide
aatgcatgtccccctggattc

SEQ ID NO: 1079 - DNA, 21 bp, Artificial Sequence
  Description of Artificial Sequence: Synthetic oligonucleotide
atgcatgtccccctggattca

SEQ ID NO: 1080 - DNA, 21 bp, Artificial Sequence
  Description of Artificial Sequence: Synthetic oligonucleotide
tgcatgtccccctggattcag

SEQ ID NO: 1081 - DNA, 21 bp, Artificial Sequence
  Description of Artificial Sequence: Synthetic oligonucleotide
gcatgtccccctggattcagg

SEQ ID NO: 1082 - DNA, 21 bp, Artificial Sequence
  Description of Artificial Sequence: Synthetic oligonucleotide
catgtccccctggattcaggc

SEQ ID NO: 1083 - DNA, 21 bp, Artificial Sequence
  Description of Artificial Sequence: Synthetic oligonucleotide
atgtccccctggattcaggcc

SEQ ID NO: 1084 - DNA, 21 bp, Artificial Sequence
  Description of Artificial Sequence: Synthetic oligonucleotide
tgtccccctggattcaggccc

SEQ ID NO: 1085 - DNA, 21 bp, Artificial Sequence
  Description of Artificial Sequence: Synthetic oligonucleotide
gtccccctggattcaggccct

SEQ ID NO: 1086 - DNA, 21 bp, Artificial Sequence
  Description of Artificial Sequence: Synthetic oligonucleotide
tccccctggattcaggccctg

SEQ ID NO: 1087 - DNA, 21 bp, Artificial Sequence
  Description of Artificial Sequence: Synthetic oligonucleotide
ccccctggattcaggccctgg

SEQ ID NO: 1088 - DNA, 21 bp, Artificial Sequence
  Description of Artificial Sequence: Synthetic oligonucleotide
cccctggattcaggccctggg

SEQ ID NO: 1089 - DNA, 21 bp, Artificial Sequence
  Description of Artificial Sequence: Synthetic oligonucleotide
ccctggattcaggccctgggt

SEQ ID NO: 1090 - DNA, 21 bp, Artificial Sequence
  Description of Artificial Sequence: Synthetic oligonucleotide
cctggattcaggccctgggta

SEQ ID NO: 1091 - DNA, 21 bp, Artificial Sequence
  Description of Artificial Sequence: Synthetic oligonucleotide
ctggattcaggccctgggtac

SEQ ID NO: 1092 - DNA, 21 bp, Artificial Sequence
  Description of Artificial Sequence: Synthetic oligonucleotide
tggattcaggccctgggtaca

SEQ ID NO: 1093 - DNA, 21 bp, Artificial Sequence
  Description of Artificial Sequence: Synthetic oligonucleotide
ggattcaggccctgggtacaa

SEQ ID NO: 1094 - DNA, 21 bp, Artificial Sequence
  Description of Artificial Sequence: Synthetic oligonucleotide
gattcaggccctgggtacaat

SEQ ID NO: 1095 - DNA, 21 bp, Artificial Sequence
  Description of Artificial Sequence: Synthetic oligonucleotide
attcaggccctgggtacaatt

SEQ ID NO: 1096 - DNA, 21 bp, Artificial Sequence
  Description of Artificial Sequence: Synthetic oligonucleotide
ttcaggccctgggtacaattt

SEQ ID NO: 1097 - DNA, 21 bp, Artificial Sequence
  Description of Artificial Sequence: Synthetic oligonucleotide
tcaggccctgggtacaatttt

SEQ ID NO: 1098 - DNA, 21 bp, Artificial Sequence
  Description of Artificial Sequence: Synthetic oligonucleotide
caggccctgggtacaattttg

SEQ ID NO: 1099 - DNA, 21 bp, Artificial Sequence
  Description of Artificial Sequence: Synthetic oligonucleotide
aggccctgggtacaattttgg

SEQ ID NO: 1100 - DNA, 21 bp, Artificial Sequence
  Description of Artificial Sequence: Synthetic oligonucleotide
ggccctgggtacaattttggt

SEQ ID NO: 1101 - DNA, 21 bp, Artificial Sequence
  Description of Artificial Sequence: Synthetic oligonucleotide
gccctgggtacaattttggtt

SEQ ID NO: 1102 - DNA, 21 bp, Artificial Sequence
  Description of Artificial Sequence: Synthetic oligonucleotide
ccctgggtacaattttggttt

SEQ ID NO: 1103 - DNA, 21 bp, Artificial Sequence
  Description of Artificial Sequence: Synthetic oligonucleotide
cctgggtacaattttggtttt

SEQ ID NO: 1104 - DNA, 21 bp, Artificial Sequence
  Description of Artificial Sequence: Synthetic oligonucleotide
ctgggtacaattttggttttt

SEQ ID NO: 1105 - DNA, 21 bp, Artificial Sequence
  Description of Artificial Sequence: Synthetic oligonucleotide
tgggtacaattttggtttttt

SEQ ID NO: 1106 - DNA, 21 bp, Artificial Sequence
  Description of Artificial Sequence: Synthetic oligonucleotide
gggtacaattttggttttttc

SEQ ID NO: 1107 - DNA, 21 bp, Artificial Sequence
  Description of Artificial Sequence: Synthetic oligonucleotide
ggtacaattttggttttttcc

SEQ ID NO: 1108 - DNA, 21 bp, Artificial Sequence
  Description of Artificial Sequence: Synthetic oligonucleotide
gtacaattttggttttttcct

SEQ ID NO: 1109 - DNA, 21 bp, Artificial Sequence
  Description of Artificial Sequence: Synthetic oligonucleotide
tacaattttggttttttcctt

SEQ ID NO: 1110 - DNA, 21 bp, Artificial Sequence
  Description of Artificial Sequence: Synthetic oligonucleotide
acaattttggttttttccttt

SEQ ID NO: 1111 - DNA, 21 bp, Artificial Sequence
  Description of Artificial Sequence: Synthetic oligonucleotide
caattttggttttttcctttt

SEQ ID NO: 1112 - DNA, 21 bp, Artificial Sequence
  Description of Artificial Sequence: Synthetic oligonucleotide
aattttggttttttccttttt

SEQ ID NO: 1113 - DNA, 21 bp, Artificial Sequence
  Description of Artificial Sequence: Synthetic oligonucleotide
attttggttttttcctttttg

SEQ ID NO: 1114 - DNA, 21 bp, Artificial Sequence
  Description of Artificial Sequence: Synthetic oligonucleotide
ttttggttttttcctttttgt

SEQ ID NO: 1115 - DNA, 21 bp, Artificial Sequence
  Description of Artificial Sequence: Synthetic oligonucleotide
tttggttttttcctttttgtg

SEQ ID NO: 1116 - DNA, 21 bp, Artificial Sequence
  Description of Artificial Sequence: Synthetic oligonucleotide
ttggttttttcctttttgtgt

SEQ ID NO: 1117 - DNA, 21 bp, Artificial Sequence
  Description of Artificial Sequence: Synthetic oligonucleotide
tggttttttcctttttgtgtt

SEQ ID NO: 1118 - DNA, 21 bp, Artificial Sequence
  Description of Artificial Sequence: Synthetic oligonucleotide
ggttttttcctttttgtgttt

SEQ ID NO: 1119 - DNA, 21 bp, Artificial Sequence
  Description of Artificial Sequence: Synthetic oligonucleotide
gttttttcctttttgtgtttc

SEQ ID NO: 1120 - DNA, 21 bp, Artificial Sequence
  Description of Artificial Sequence: Synthetic oligonucleotide
ttttttcctttttgtgtttct

SEQ ID NO: 1121 - DNA, 21 bp, Artificial Sequence
  Description of Artificial Sequence: Synthetic oligonucleotide
tttttcctttttgtgtttctg

SEQ ID NO: 1122 - DNA, 21 bp, Artificial Sequence
  Description of Artificial Sequence: Synthetic oligonucleotide
ttttcctttttgtgtttctgt

SEQ ID NO: 1123 - DNA, 21 bp, Artificial Sequence
  Description of Artificial Sequence: Synthetic oligonucleotide
tttcctttttgtgtttctgtg

SEQ ID NO: 1124 - DNA, 21 bp, Artificial Sequence
  Description of Artificial Sequence: Synthetic oligonucleotide
ttcctttttgtgtttctgtgt

SEQ ID NO: 1125 - DNA, 21 bp, Artificial Sequence
  Description of Artificial Sequence: Synthetic oligonucleotide
tcctttttgtgtttctgtgtt

SEQ ID NO: 1126 - DNA, 21 bp, Artificial Sequence
  Description of Artificial Sequence: Synthetic oligonucleotide
cctttttgtgtttctgtgttt

SEQ ID NO: 1127 - DNA, 21 bp, Artificial Sequence
  Description of Artificial Sequence: Synthetic oligonucleotide
ctttttgtgtttctgtgttta

SEQ ID NO: 1128 - DNA, 21 bp, Artificial Sequence
  Description of Artificial Sequence: Synthetic oligonucleotide
tttttgtgtttctgtgtttac

SEQ ID NO: 1129 - DNA, 21 bp, Artificial Sequence
  Description of Artificial Sequence: Synthetic oligonucleotide
ttttgtgtttctgtgtttact

SEQ ID NO: 1130 - DNA, 21 bp, Artificial Sequence
  Description of Artificial Sequence: Synthetic oligonucleotide
tttgtgtttctgtgtttactc

SEQ ID NO: 1131 - DNA, 21 bp, Artificial Sequence
  Description of Artificial Sequence: Synthetic oligonucleotide
ttgtgtttctgtgtttactca

SEQ ID NO: 1132 - DNA, 21 bp, Artificial Sequence
  Description of Artificial Sequence: Synthetic oligonucleotide
tgtgtttctgtgtttactcag

SEQ ID NO: 1133 - DNA, 21 bp, Artificial Sequence
  Description of Artificial Sequence: Synthetic oligonucleotide
gtgtttctgtgtttactcagc

SEQ ID NO: 1134 - DNA, 21 bp, Artificial Sequence
  Description of Artificial Sequence: Synthetic oligonucleotide
tgtttctgtgtttactcagcc

SEQ ID NO: 1135 - DNA, 21 bp, Artificial Sequence
  Description of Artificial Sequence: Synthetic oligonucleotide
gtttctgtgtttactcagcct

SEQ ID NO: 1136 - DNA, 21 bp, Artificial Sequence
  Description of Artificial Sequence: Synthetic oligonucleotide
tttctgtgtttactcagcctt

SEQ ID NO: 1137 - DNA, 21 bp, Artificial Sequence
  Description of Artificial Sequence: Synthetic oligonucleotide
ttctgtgtttactcagccttc

SEQ ID NO: 1138 - DNA, 21 bp, Artificial Sequence
  Description of Artificial Sequence: Synthetic oligonucleotide
tctgtgtttactcagccttca

SEQ ID NO: 1139 - DNA, 21 bp, Artificial Sequence
  Description of Artificial Sequence: Synthetic oligonucleotide
ctgtgtttactcagccttcat

SEQ ID NO: 1140 - DNA, 21 bp, Artificial Sequence
  Description of Artificial Sequence: Synthetic oligonucleotide
tgtgtttactcagccttcatt

SEQ ID NO: 1141 - DNA, 21 bp, Artificial Sequence
  Description of Artificial Sequence: Synthetic oligonucleotide
gtgtttactcagccttcattt

SEQ ID NO: 1142 - DNA, 21 bp, Artificial Sequence
  Description of Artificial Sequence: Synthetic oligonucleotide
tgtttactcagccttcatttc

SEQ ID NO: 1143 - DNA, 21 bp, Artificial Sequence
  Description of Artificial Sequence: Synthetic oligonucleotide
gtttactcagccttcatttca

SEQ ID NO: 1144 - DNA, 21 bp, Artificial Sequence
  Description of Artificial Sequence: Synthetic oligonucleotide
tttactcagccttcatttcag

SEQ ID NO: 1145 - DNA, 21 bp, Artificial Sequence
  Description of Artificial Sequence: Synthetic oligonucleotide
ttactcagccttcatttcaga

SEQ ID NO: 1146 - DNA, 21 bp, Artificial Sequence
  Description of Artificial Sequence: Synthetic oligonucleotide
tactcagccttcatttcagaa

SEQ ID NO: 1147 - DNA, 21 bp, Artificial Sequence
  Description of Artificial Sequence: Synthetic oligonucleotide
actcagccttcatttcagaaa

SEQ ID NO: 1148 - DNA, 21 bp, Artificial Sequence
  Description of Artificial Sequence: Synthetic oligonucleotide
ctcagccttcatttcagaaaa

SEQ ID NO: 1149 - DNA, 21 bp, Artificial Sequence
  Description of Artificial Sequence: Synthetic oligonucleotide
tcagccttcatttcagaaaat

SEQ ID NO: 1150 - DNA, 21 bp, Artificial Sequence
  Description of Artificial Sequence: Synthetic oligonucleotide
cagccttcatttcagaaaatc

SEQ ID NO: 1151 - DNA, 21 bp, Artificial Sequence
  Description of Artificial Sequence: Synthetic oligonucleotide
agccttcatttcagaaaatct

SEQ ID NO: 1152 - DNA, 21 bp, Artificial Sequence
  Description of Artificial Sequence: Synthetic oligonucleotide
gccttcatttcagaaaatctg

SEQ ID NO: 1153 - DNA, 21 bp, Artificial Sequence
  Description of Artificial Sequence: Synthetic oligonucleotide
ccttcatttcagaaaatctgc

SEQ ID NO: 1154 - DNA, 21 bp, Artificial Sequence
  Description of Artificial Sequence: Synthetic oligonucleotide
cttcatttcagaaaatctgcc

SEQ ID NO: 1155 - DNA, 21 bp, Artificial Sequence
  Description of Artificial Sequence: Synthetic oligonucleotide
ttcatttcagaaaatctgcca

SEQ ID NO: 1156 - DNA, 21 bp, Artificial Sequence
  Description of Artificial Sequence: Synthetic oligonucleotide
tcatttcagaaaatctgccat

SEQ ID NO: 1157 - DNA, 21 bp, Artificial Sequence
  Description of Artificial Sequence: Synthetic oligonucleotide
catttcagaaaatctgccatc

SEQ ID NO: 1158 - DNA, 21 bp, Artificial Sequence
  Description of Artificial Sequence: Synthetic oligonucleotide
atttcagaaaatctgccatct

SEQ ID NO: 1159 - DNA, 21 bp, Artificial Sequence
  Description of Artificial Sequence: Synthetic oligonucleotide
tttcagaaaatctgccatctg

SEQ ID NO: 1160 - DNA, 21 bp, Artificial Sequence
  Description of Artificial Sequence: Synthetic oligonucleotide
ttcagaaaatctgccatctgc

SEQ ID NO: 1161 - DNA, 21 bp, Artificial Sequence
  Description of Artificial Sequence: Synthetic oligonucleotide
tcagaaaatctgccatctgct

SEQ ID NO: 1162 - DNA, 21 bp, Artificial Sequence
  Description of Artificial Sequence: Synthetic oligonucleotide
cagaaaatctgccatctgctt

SEQ ID NO: 1163 - DNA, 21 bp, Artificial Sequence
  Description of Artificial Sequence: Synthetic oligonucleotide
agaaaatctgccatctgcttc

SEQ ID NO: 1164 - DNA, 21 bp, Artificial Sequence
  Description of Artificial Sequence: Synthetic oligonucleotide
gaaaatctgccatctgcttct

SEQ ID NO: 1165 - DNA, 21 bp, Artificial Sequence
  Description of Artificial Sequence: Synthetic oligonucleotide
aaaatctgccatctgcttctg

SEQ ID NO: 1166 - DNA, 21 bp, Artificial Sequence
  Description of Artificial Sequence: Synthetic oligonucleotide
aaatctgccatctgcttctgg

SEQ ID NO: 1167 - DNA, 21 bp, Artificial Sequence
  Description of Artificial Sequence: Synthetic oligonucleotide
aatctgccatctgcttctggg

SEQ ID NO: 1168 - DNA, 21 bp, Artificial Sequence
  Description of Artificial Sequence: Synthetic oligonucleotide
atctgccatctgcttctggga

SEQ ID NO: 1169 - DNA, 21 bp, Artificial Sequence
  Description of Artificial Sequence: Synthetic oligonucleotide
tctgccatctgcttctgggat

SEQ ID NO: 1170 - DNA, 21 bp, Artificial Sequence
  Description of Artificial Sequence: Synthetic oligonucleotide
ctgccatctgcttctgggatt

SEQ ID NO: 1171 - DNA, 21 bp, Artificial Sequence
  Description of Artificial Sequence: Synthetic oligonucleotide
tgccatctgcttctgggattg

SEQ ID NO: 1172 - DNA, 21 bp, Artificial Sequence
  Description of Artificial Sequence: Synthetic oligonucleotide
gccatctgcttctgggattgc

SEQ ID NO: 1173 - DNA, 21 bp, Artificial Sequence
  Description of Artificial Sequence: Synthetic oligonucleotide
ccatctgcttctgggattgct

SEQ ID NO: 1174 - DNA, 21 bp, Artificial Sequence
  Description of Artificial Sequence: Synthetic oligonucleotide
catctgcttctgggattgctt

SEQ ID NO: 1175 - DNA, 21 bp, Artificial Sequence
  Description of Artificial Sequence: Synthetic oligonucleotide
atctgcttctgggattgctta

SEQ ID NO: 1176 - DNA, 21 bp, Artificial Sequence
  Description of Artificial Sequence: Synthetic oligonucleotide
tctgcttctgggattgcttaa

SEQ ID NO: 1177 - DNA, 21 bp, Artificial Sequence
  Description of Artificial Sequence: Synthetic oligonucleotide
ctgcttctgggattgcttaag

SEQ ID NO: 1178 - DNA, 21 bp, Artificial Sequence
  Description of Artificial Sequence: Synthetic oligonucleotide
tgcttctgggattgcttaagc

SEQ ID NO: 1179 - DNA, 21 bp, Artificial Sequence
  Description of Artificial Sequence: Synthetic oligonucleotide
gcttctgggattgcttaagcc

SEQ ID NO: 1180 - DNA, 21 bp, Artificial Sequence
  Description of Artificial Sequence: Synthetic oligonucleotide
cttctgggattgcttaagccc

SEQ ID NO: 1181 - DNA, 21 bp, Artificial Sequence
  Description of Artificial Sequence: Synthetic oligonucleotide
ttctgggattgcttaagccct

SEQ ID NO: 1182 - DNA, 21 bp, Artificial Sequence
  Description of Artificial Sequence: Synthetic oligonucleotide
tctgggattgcttaagccctg

SEQ ID NO: 1183 - DNA, 21 bp, Artificial Sequence
  Description of Artificial Sequence: Synthetic oligonucleotide
ctgggattgcttaagccctgt

SEQ ID NO: 1184 - DNA, 21 bp, Artificial Sequence
  Description of Artificial Sequence: Synthetic oligonucleotide
tgggattgcttaagccctgtg

SEQ ID NO: 1185 - DNA, 21 bp, Artificial Sequence
  Description of Artificial Sequence: Synthetic oligonucleotide
gggattgcttaagccctgtgg

SEQ ID NO: 1186 - DNA, 21 bp, Artificial Sequence
  Description of Artificial Sequence: Synthetic oligonucleotide
ggattgcttaagccctgtggg

SEQ ID NO: 1187 - DNA, 21 bp, Artificial Sequence
  Description of Artificial Sequence: Synthetic oligonucleotide
gattgcttaagccctgtgggt

SEQ ID NO: 1188 - DNA, 21 bp, Artificial Sequence
  Description of Artificial Sequence: Synthetic oligonucleotide
attgcttaagccctgtgggtg

SEQ ID NO: 1189 - DNA, 21 bp, Artificial Sequence
  Description of Artificial Sequence: Synthetic oligonucleotide
ttgcttaagccctgtgggtgt

SEQ ID NO: 1190 - DNA, 21 bp, Artificial Sequence
  Description of Artificial Sequence: Synthetic oligonucleotide
tgcttaagccctgtgggtgtc

SEQ ID NO: 1191 - DNA, 21 bp, Artificial Sequence
  Description of Artificial Sequence: Synthetic oligonucleotide
gcttaagccctgtgggtgtcc

SEQ ID NO: 1192 - DNA, 21 bp, Artificial Sequence
  Description of Artificial Sequence: Synthetic oligonucleotide
cttaagccctgtgggtgtcct

SEQ ID NO: 1193 - DNA, 21 bp, Artificial Sequence
  Description of Artificial Sequence: Synthetic oligonucleotide
ttaagccctgtgggtgtcctg

SEQ ID NO: 1194 - DNA, 21 bp, Artificial Sequence
  Description of Artificial Sequence: Synthetic oligonucleotide
taagccctgtgggtgtcctgg

SEQ ID NO: 1195 - DNA, 21 bp, Artificial Sequence
  Description of Artificial Sequence: Synthetic oligonucleotide
aagccctgtgggtgtcctggt

SEQ ID NO: 1196 - DNA, 21 bp, Artificial Sequence
  Description of Artificial Sequence: Synthetic oligonucleotide
agccctgtgggtgtcctggtc

SEQ ID NO: 1197 - DNA, 21 bp, Artificial Sequence
  Description of Artificial Sequence: Synthetic oligonucleotide
gccctgtgggtgtcctggtca

SEQ ID NO: 1198 - DNA, 21 bp, Artificial Sequence
  Description of Artificial Sequence: Synthetic oligonucleotide
ccctgtgggtgtcctggtcat

SEQ ID NO: 1199 - DNA, 21 bp, Artificial Sequence
  Description of Artificial Sequence: Synthetic oligonucleotide
cctgtgggtgtcctggtcatt

SEQ ID NO: 1200 - DNA, 21 bp, Artificial Sequence
  Description of Artificial Sequence: Synthetic oligonucleotide
ctgtgggtgtcctggtcattg

SEQ ID NO: 1201 - DNA, 21 bp, Artificial Sequence
  Description of Artificial Sequence: Synthetic oligonucleotide
tgtgggtgtcctggtcattgg

SEQ ID NO: 1202 - DNA, 21 bp, Artificial Sequence
  Description of Artificial Sequence: Synthetic oligonucleotide
gtgggtgtcctggtcattggt

SEQ ID NO: 1203 - DNA, 22 bp, Artificial Sequence
  Description of Artificial Sequence: Synthetic oligonucleotide
cccaactaatctccatttgcca

SEQ ID NO: 1204 - DNA, 22 bp, Artificial Sequence
  Description of Artificial Sequence: Synthetic oligonucleotide
ccaactaatctccatttgccac

SEQ ID NO: 1205 - DNA, 22 bp, Artificial Sequence
  Description of Artificial Sequence: Synthetic oligonucleotide
caactaatctccatttgccact

SEQ ID NO: 1206 - DNA, 22 bp, Artificial Sequence
  Description of Artificial Sequence: Synthetic oligonucleotide
aactaatctccatttgccactg

SEQ ID NO: 1207 - DNA, 22 bp, Artificial Sequence
  Description of Artificial Sequence: Synthetic oligonucleotide
actaatctccatttgccactga

SEQ ID NO: 1208 - DNA, 22 bp, Artificial Sequence
  Description of Artificial Sequence: Synthetic oligonucleotide
ctaatctccatttgccactgac

SEQ ID NO: 1209 - DNA, 22 bp, Artificial Sequence
  Description of Artificial Sequence: Synthetic oligonucleotide
taatctccatttgccactgacc

SEQ ID NO: 1210 - DNA, 22 bp, Artificial Sequence
  Description of Artificial Sequence: Synthetic oligonucleotide
aatctccatttgccactgacca

SEQ ID NO: 1211 - DNA, 22 bp, Artificial Sequence
  Description of Artificial Sequence: Synthetic oligonucleotide
atctccatttgccactgaccag

SEQ ID NO: 1212 - DNA, 22 bp, Artificial Sequence
  Description of Artificial Sequence: Synthetic oligonucleotide
tctccatttgccactgaccagg

SEQ ID NO: 1213 - DNA, 22 bp, Artificial Sequence
  Description of Artificial Sequence: Synthetic oligonucleotide
ctccatttgccactgaccaggc

SEQ ID NO: 1214 - DNA, 22 bp, Artificial Sequence
  Description of Artificial Sequence: Synthetic oligonucleotide
tccatttgccactgaccaggcc

SEQ ID NO: 1215 - DNA, 22 bp, Artificial Sequence
  Description of Artificial Sequence: Synthetic oligonucleotide
ccatttgccactgaccaggcca

SEQ ID NO: 1216 - DNA, 22 bp, Artificial Sequence
  Description of Artificial Sequence: Synthetic oligonucleotide
catttgccactgaccaggccac

SEQ ID NO: 1217 - DNA, 22 bp, Artificial Sequence
  Description of Artificial Sequence: Synthetic oligonucleotide
atttgccactgaccaggccaca

SEQ ID NO: 1218 - DNA, 22 bp, Artificial Sequence
  Description of Artificial Sequence: Synthetic oligonucleotide
tttgccactgaccaggccacag

SEQ ID NO: 1219 - DNA, 22 bp, Artificial Sequence
  Description of Artificial Sequence: Synthetic oligonucleotide
ttgccactgaccaggccacaga

SEQ ID NO: 1220 - DNA, 22 bp, Artificial Sequence
  Description of Artificial Sequence: Synthetic oligonucleotide
tgccactgaccaggccacagat

SEQ ID NO: 1221 - DNA, 22 bp, Artificial Sequence
  Description of Artificial Sequence: Synthetic oligonucleotide
gccactgaccaggccacagatg

SEQ ID NO: 1222 - DNA, 22 bp, Artificial Sequence
  Description of Artificial Sequence: Synthetic oligonucleotide
ccactgaccaggccacagatgg

SEQ ID NO: 1223 - DNA, 22 bp, Artificial Sequence
  Description of Artificial Sequence: Synthetic oligonucleotide
cactgaccaggccacagatggg

SEQ ID NO: 1224 - DNA, 22 bp, Artificial Sequence
  Description of Artificial Sequence: Synthetic oligonucleotide
actgaccaggccacagatgggg

SEQ ID NO: 1225 - DNA, 22 bp, Artificial Sequence
  Description of Artificial Sequence: Synthetic oligonucleotide
ctgaccaggccacagatgggga

SEQ ID NO: 1226 - DNA, 22 bp, Artificial Sequence
  Description of Artificial Sequence: Synthetic oligonucleotide
tgaccaggccacagatggggaa

SEQ ID NO: 1227 - DNA, 22 bp, Artificial Sequence
  Description of Artificial Sequence: Synthetic oligonucleotide
gaccaggccacagatggggaag

SEQ ID NO: 1228 - DNA, 22 bp, Artificial Sequence
  Description of Artificial Sequence: Synthetic oligonucleotide
accaggccacagatggggaagt

SEQ ID NO: 1229 - DNA, 22 bp, Artificial Sequence
  Description of Artificial Sequence: Synthetic oligonucleotide
ccaggccacagatggggaagtc

SEQ ID NO: 1230 - DNA, 22 bp, Artificial Sequence
  Description of Artificial Sequence: Synthetic oligonucleotide
caggccacagatggggaagtca

SEQ ID NO: 1231 - DNA, 22 bp, Artificial Sequence
  Description of Artificial Sequence: Synthetic oligonucleotide
aggccacagatggggaagtcac

SEQ ID NO: 1232 - DNA, 22 bp, Artificial Sequence
  Description of Artificial Sequence: Synthetic oligonucleotide
ggccacagatggggaagtcaca

SEQ ID NO: 1233 - DNA, 22 bp, Artificial Sequence
  Description of Artificial Sequence: Synthetic oligonucleotide
gccacagatggggaagtcacag

SEQ ID NO: 1234 - DNA, 22 bp, Artificial Sequence
  Description of Artificial Sequence: Synthetic oligonucleotide
ccacagatggggaagtcacagc

SEQ ID NO: 1235 - DNA, 22 bp, Artificial Sequence
  Description of Artificial Sequence: Synthetic oligonucleotide
cacagatggggaagtcacagcc

SEQ ID NO: 1236 - DNA, 22 bp, Artificial Sequence
  Description of Artificial Sequence: Synthetic oligonucleotide
acagatggggaagtcacagccg

SEQ ID NO: 1237 - DNA, 22 bp, Artificial Sequence
  Description of Artificial Sequence: Synthetic oligonucleotide
cagatggggaagtcacagccgt

SEQ ID NO: 1238 - DNA, 22 bp, Artificial Sequence
  Description of Artificial Sequence: Synthetic oligonucleotide
agatggggaagtcacagccgtg

SEQ ID NO: 1239 - DNA, 22 bp, Artificial Sequence
  Description of Artificial Sequence: Synthetic oligonucleotide
gatggggaagtcacagccgtgg

SEQ ID NO: 1240 - DNA, 22 bp, Artificial Sequence
  Description of Artificial Sequence: Synthetic oligonucleotide
atggggaagtcacagccgtgga

SEQ ID NO: 1241 - DNA, 22 bp, Artificial Sequence
  Description of Artificial Sequence: Synthetic oligonucleotide
tggggaagtcacagccgtggag

SEQ ID NO: 1242 - DNA, 22 bp, Artificial Sequence
  Description of Artificial Sequence: Synthetic oligonucleotide
ggggaagtcacagccgtggagg

SEQ ID NO: 1243 - DNA, 22 bp, Artificial Sequence
  Description of Artificial Sequence: Synthetic oligonucleotide
gggaagtcacagccgtggagga

SEQ ID NO: 1244 - DNA, 22 bp, Artificial Sequence
  Description of Artificial Sequence: Synthetic oligonucleotide
ggaagtcacagccgtggaggag

SEQ ID NO: 1245 - DNA, 22 bp, Artificial Sequence
  Description of Artificial Sequence: Synthetic oligonucleotide
gaagtcacagccgtggaggagg

SEQ ID NO: 1246 - DNA, 22 bp, Artificial Sequence
  Description of Artificial Sequence: Synthetic oligonucleotide
aagtcacagccgtggaggaggc

SEQ ID NO: 1247 - DNA, 22 bp, Artificial Sequence
  Description of Artificial Sequence: Synthetic oligonucleotide
agtcacagccgtggaggaggca

SEQ ID NO: 1248 - DNA, 22 bp, Artificial Sequence
  Description of Artificial Sequence: Synthetic oligonucleotide
gtcacagccgtggaggaggcac

SEQ ID NO: 1249 - DNA, 22 bp, Artificial Sequence
  Description of Artificial Sequence: Synthetic oligonucleotide
tcacagccgtggaggaggcacc

SEQ ID NO: 1250 - DNA, 22 bp, Artificial Sequence
  Description of Artificial Sequence: Synthetic oligonucleotide
cacagccgtggaggaggcaccg

SEQ ID NO: 1251 - DNA, 22 bp, Artificial Sequence
  Description of Artificial Sequence: Synthetic oligonucleotide
acagccgtggaggaggcaccgg

SEQ ID NO: 1252 - DNA, 22 bp, Artificial Sequence
  Description of Artificial Sequence: Synthetic oligonucleotide
cagccgtggaggaggcaccggt

SEQ ID NO: 1253 - DNA, 22 bp, Artificial Sequence
  Description of Artificial Sequence: Synthetic oligonucleotide
agccgtggaggaggcaccggta

SEQ ID NO: 1254 - DNA, 22 bp, Artificial Sequence
  Description of Artificial Sequence: Synthetic oligonucleotide
gccgtggaggaggcaccggtaa

SEQ ID NO: 1255 - DNA, 22 bp, Artificial Sequence
  Description of Artificial Sequence: Synthetic oligonucleotide
ccgtggaggaggcaccggtaaa

SEQ ID NO: 1256 - DNA, 22 bp, Artificial Sequence
  Description of Artificial Sequence: Synthetic oligonucleotide
cgtggaggaggcaccggtaaat

SEQ ID NO: 1257 - DNA, 22 bp, Artificial Sequence
  Description of Artificial Sequence: Synthetic oligonucleotide
gtggaggaggcaccggtaaatg

SEQ ID NO: 1258 - DNA, 22 bp, Artificial Sequence
  Description of Artificial Sequence: Synthetic oligonucleotide
tggaggaggcaccggtaaatgc

SEQ ID NO: 1259 - DNA, 22 bp, Artificial Sequence
  Description of Artificial Sequence: Synthetic oligonucleotide
ggaggaggcaccggtaaatgca

SEQ ID NO: 1260 - DNA, 22 bp, Artificial Sequence
  Description of Artificial Sequence: Synthetic oligonucleotide
gaggaggcaccggtaaatgcat

SEQ ID NO: 1261 - DNA, 22 bp, Artificial Sequence
  Description of Artificial Sequence: Synthetic oligonucleotide
aggaggcaccggtaaatgcatg

SEQ ID NO: 1262 - DNA, 22 bp, Artificial Sequence
  Description of Artificial Sequence: Synthetic oligonucleotide
ggaggcaccggtaaatgcatgt

SEQ ID NO: 1263 - DNA, 22 bp, Artificial Sequence
  Description of Artificial Sequence: Synthetic oligonucleotide
gaggcaccggtaaatgcatgtc

SEQ ID NO: 1264 - DNA, 22 bp, Artificial Sequence
  Description of Artificial Sequence: Synthetic oligonucleotide
aggcaccggtaaatgcatgtcc

SEQ ID NO: 1265 - DNA, 22 bp, Artificial Sequence
  Description of Artificial Sequence: Synthetic oligonucleotide
ggcaccggtaaatgcatgtccc

SEQ ID NO: 1266 - DNA, 22 bp, Artificial Sequence
  Description of Artificial Sequence: Synthetic oligonucleotide
gcaccggtaaatgcatgtcccc

SEQ ID NO: 1267 - DNA, 22 bp, Artificial Sequence
  Description of Artificial Sequence: Synthetic oligonucleotide
caccggtaaatgcatgtccccc

SEQ ID NO: 1268 - DNA, 22 bp, Artificial Sequence
  Description of Artificial Sequence: Synthetic oligonucleotide
accggtaaatgcatgtccccct

SEQ ID NO: 1269 - DNA, 22 bp, Artificial Sequence
  Description of Artificial Sequence: Synthetic oligonucleotide
ccggtaaatgcatgtccccctg

SEQ ID NO: 1270 - DNA, 22 bp, Artificial Sequence
  Description of Artificial Sequence: Synthetic oligonucleotide
cggtaaatgcatgtccccctgg

SEQ ID NO: 1271 - DNA, 22 bp, Artificial Sequence
  Description of Artificial Sequence: Synthetic oligonucleotide
ggtaaatgcatgtccccctgga

SEQ ID NO: 1272 - DNA, 22 bp, Artificial Sequence
  Description of Artificial Sequence: Synthetic oligonucleotide
gtaaatgcatgtccccctggat

SEQ ID NO: 1273 - DNA, 22 bp, Artificial Sequence
  Description of Artificial Sequence: Synthetic oligonucleotide
taaatgcatgtccccctggatt

SEQ ID NO: 1274 - DNA, 22 bp, Artificial Sequence
  Description of Artificial Sequence: Synthetic oligonucleotide
aaatgcatgtccccctggattc

SEQ ID NO: 1275 - DNA, 22 bp, Artificial Sequence
  Description of Artificial Sequence: Synthetic oligonucleotide
aatgcatgtccccctggattca

SEQ ID NO: 1276 - DNA, 22 bp, Artificial Sequence
  Description of Artificial Sequence: Synthetic oligonucleotide
atgcatgtccccctggattcag

SEQ ID NO: 1277 - DNA, 22 bp, Artificial Sequence
  Description of Artificial Sequence: Synthetic oligonucleotide
tgcatgtccccctggattcagg

SEQ ID NO: 1278 - DNA, 22 bp, Artificial Sequence
  Description of Artificial Sequence: Synthetic oligonucleotide
gcatgtccccctggattcaggc

SEQ ID NO: 1279 - DNA, 22 bp, Artificial Sequence
  Description of Artificial Sequence: Synthetic oligonucleotide
catgtccccctggattcaggcc

SEQ ID NO: 1280 - DNA, 22 bp, Artificial Sequence
  Description of Artificial Sequence: Synthetic oligonucleotide
atgtccccctggattcaggccc

SEQ ID NO: 1281 - DNA, 22 bp, Artificial Sequence
  Description of Artificial Sequence: Synthetic oligonucleotide
tgtccccctggattcaggccct

SEQ ID NO: 1282 - DNA, 22 bp, Artificial Sequence
  Description of Artificial Sequence: Synthetic oligonucleotide
gtccccctggattcaggccctg

SEQ ID NO: 1283 - DNA, 22 bp, Artificial Sequence
  Description of Artificial Sequence: Synthetic oligonucleotide
tccccctggattcaggccctgg

SEQ ID NO: 1284 - DNA, 22 bp, Artificial Sequence
  Description of Artificial Sequence: Synthetic oligonucleotide
ccccctggattcaggccctggg

SEQ ID NO: 1285 - DNA, 22 bp, Artificial Sequence
  Description of Artificial Sequence: Synthetic oligonucleotide
cccctggattcaggccctgggt

SEQ ID NO: 1286 - DNA, 22 bp, Artificial Sequence
  Description of Artificial Sequence: Synthetic oligonucleotide
ccctggattcaggccctgggta

SEQ ID NO: 1287 - DNA, 22 bp, Artificial Sequence
  Description of Artificial Sequence: Synthetic oligonucleotide
cctggattcaggccctgggtac

SEQ ID NO: 1288 - DNA, 22 bp, Artificial Sequence
  Description of Artificial Sequence: Synthetic oligonucleotide
ctggattcaggccctgggtaca

SEQ ID NO: 1289 - DNA, 22 bp, Artificial Sequence
  Description of Artificial Sequence: Synthetic oligonucleotide
tggattcaggccctgggtacaa

SEQ ID NO: 1290 - DNA, 22 bp, Artificial Sequence
  Description of Artificial Sequence: Synthetic oligonucleotide
ggattcaggccctgggtacaat

SEQ ID NO: 1291 - DNA, 22 bp, Artificial Sequence
  Description of Artificial Sequence: Synthetic oligonucleotide
gattcaggccctgggtacaatt

SEQ ID NO: 1292 - DNA, 22 bp, Artificial Sequence
  Description of Artificial Sequence: Synthetic oligonucleotide
attcaggccctgggtacaattt

SEQ ID NO: 1293 - DNA, 22 bp, Artificial Sequence
  Description of Artificial Sequence: Synthetic oligonucleotide
ttcaggccctgggtacaatttt

SEQ ID NO: 1294 - DNA, 22 bp, Artificial Sequence
  Description of Artificial Sequence: Synthetic oligonucleotide
tcaggccctgggtacaattttg

SEQ ID NO: 1295 - DNA, 22 bp, Artificial Sequence
  Description of Artificial Sequence: Synthetic oligonucleotide
caggccctgggtacaattttgg

SEQ ID NO: 1296 - DNA, 22 bp, Artificial Sequence
  Description of Artificial Sequence: Synthetic oligonucleotide
aggccctgggtacaattttggt

SEQ ID NO: 1297 - DNA, 22 bp, Artificial Sequence
  Description of Artificial Sequence: Synthetic oligonucleotide
ggccctgggtacaattttggtt

SEQ ID NO: 1298 - DNA, 22 bp, Artificial Sequence
  Description of Artificial Sequence: Synthetic oligonucleotide
gccctgggtacaattttggttt

SEQ ID NO: 1299 - DNA, 22 bp, Artificial Sequence
  Description of Artificial Sequence: Synthetic oligonucleotide
ccctgggtacaattttggtttt

SEQ ID NO: 1300 - DNA, 22 bp, Artificial Sequence
  Description of Artificial Sequence: Synthetic oligonucleotide
cctgggtacaattttggttttt

SEQ ID NO: 1301 - DNA, 22 bp, Artificial Sequence
  Description of Artificial Sequence: Synthetic oligonucleotide
ctgggtacaattttggtttttt

SEQ ID NO: 1302 - DNA, 22 bp, Artificial Sequence
  Description of Artificial Sequence: Synthetic oligonucleotide
tgggtacaattttggttttttc

SEQ ID NO: 1303 - DNA, 22 bp, Artificial Sequence
  Description of Artificial Sequence: Synthetic oligonucleotide
gggtacaattttggttttttcc

SEQ ID NO: 1304 - DNA, 22 bp, Artificial Sequence
  Description of Artificial Sequence: Synthetic oligonucleotide
ggtacaattttggttttttcct

SEQ ID NO: 1305 - DNA, 22 bp, Artificial Sequence
  Description of Artificial Sequence: Synthetic oligonucleotide
gtacaattttggttttttcctt

SEQ ID NO: 1306 - DNA, 22 bp, Artificial Sequence
  Description of Artificial Sequence: Synthetic oligonucleotide
tacaattttggttttttccttt

SEQ ID NO: 1307 - DNA, 22 bp, Artificial Sequence
  Description of Artificial Sequence: Synthetic oligonucleotide
acaattttggttttttcctttt

SEQ ID NO: 1308 - DNA, 22 bp, Artificial Sequence
  Description of Artificial Sequence: Synthetic oligonucleotide
caattttggttttttccttttt

SEQ ID NO: 1309 - DNA, 22 bp, Artificial Sequence
  Description of Artificial Sequence: Synthetic oligonucleotide
aattttggttttttcctttttg

SEQ ID NO: 1310 - DNA, 22 bp, Artificial Sequence
  Description of Artificial Sequence: Synthetic oligonucleotide
attttggttttttcctttttgt

SEQ ID NO: 1311 - DNA, 22 bp, Artificial Sequence
  Description of Artificial Sequence: Synthetic oligonucleotide
ttttggttttttcctttttgtg

SEQ ID NO: 1312 - DNA, 22 bp, Artificial Sequence
  Description of Artificial Sequence: Synthetic oligonucleotide
tttggttttttcctttttgtgt

SEQ ID NO: 1313 - DNA, 22 bp, Artificial Sequence
  Description of Artificial Sequence: Synthetic oligonucleotide
ttggttttttcctttttgtgtt

SEQ ID NO: 1314 - DNA, 22 bp, Artificial Sequence
  Description of Artificial Sequence: Synthetic oligonucleotide
tggttttttcctttttgtgttt

SEQ ID NO: 1315 - DNA, 22 bp, Artificial Sequence
  Description of Artificial Sequence: Synthetic oligonucleotide
ggttttttcctttttgtgtttc

SEQ ID NO: 1316 - DNA, 22 bp, Artificial Sequence
  Description of Artificial Sequence: Synthetic oligonucleotide
gttttttcctttttgtgtttct

SEQ ID NO: 1317 - DNA, 22 bp, Artificial Sequence
  Description of Artificial Sequence: Synthetic oligonucleotide
ttttttcctttttgtgtttctg

SEQ ID NO: 1318 - DNA, 22 bp, Artificial Sequence
  Description of Artificial Sequence: Synthetic oligonucleotide
tttttcctttttgtgtttctgt

SEQ ID NO: 1319 - DNA, 22 bp, Artificial Sequence
  Description of Artificial Sequence: Synthetic oligonucleotide
ttttcctttttgtgtttctgtg

SEQ ID NO: 1320 - DNA, 22 bp, Artificial Sequence
  Description of Artificial Sequence: Synthetic oligonucleotide
tttcctttttgtgtttctgtgt

SEQ ID NO: 1321 - DNA, 22 bp, Artificial Sequence
  Description of Artificial Sequence: Synthetic oligonucleotide
ttcctttttgtgtttctgtgtt

SEQ ID NO: 1322 - DNA, 22 bp, Artificial Sequence
  Description of Artificial Sequence: Synthetic oligonucleotide
tcctttttgtgtttctgtgttt

SEQ ID NO: 1323 - DNA, 22 bp, Artificial Sequence
  Description of Artificial Sequence: Synthetic oligonucleotide
cctttttgtgtttctgtgttta

SEQ ID NO: 1324 - DNA, 22 bp, Artificial Sequence
  Description of Artificial Sequence: Synthetic oligonucleotide
ctttttgtgtttctgtgtttac

SEQ ID NO: 1325 - DNA, 22 bp, Artificial Sequence
  Description of Artificial Sequence: Synthetic oligonucleotide
tttttgtgtttctgtgtttact

SEQ ID NO: 1326 - DNA, 22 bp, Artificial Sequence
  Description of Artificial Sequence: Synthetic oligonucleotide
ttttgtgtttctgtgtttactc

SEQ ID NO: 1327 - DNA, 22 bp, Artificial Sequence
  Description of Artificial Sequence: Synthetic oligonucleotide
tttgtgtttctgtgtttactca

SEQ ID NO: 1328 - DNA, 22 bp, Artificial Sequence
  Description of Artificial Sequence: Synthetic oligonucleotide
ttgtgtttctgtgtttactcag

SEQ ID NO: 1329 - DNA, 22 bp, Artificial Sequence
  Description of Artificial Sequence: Synthetic oligonucleotide
tgtgtttctgtgtttactcagc

SEQ ID NO: 1330 - DNA, 22 bp, Artificial Sequence
  Description of Artificial Sequence: Synthetic oligonucleotide
gtgtttctgtgtttactcagcc

SEQ ID NO: 1331 - DNA, 22 bp, Artificial Sequence
  Description of Artificial Sequence: Synthetic oligonucleotide
tgtttctgtgtttactcagcct

SEQ ID NO: 1332 - DNA, 22 bp, Artificial Sequence
  Description of Artificial Sequence: Synthetic oligonucleotide
gtttctgtgtttactcagcctt

SEQ ID NO: 1333 - DNA, 22 bp, Artificial Sequence
  Description of Artificial Sequence: Synthetic oligonucleotide
tttctgtgtttactcagccttc

SEQ ID NO: 1334 - DNA, 22 bp, Artificial Sequence
  Description of Artificial Sequence: Synthetic oligonucleotide
ttctgtgtttactcagccttca

SEQ ID NO: 1335 - DNA, 22 bp, Artificial Sequence
  Description of Artificial Sequence: Synthetic oligonucleotide
tctgtgtttactcagccttcat

SEQ ID NO: 1336 - DNA, 22 bp, Artificial Sequence
  Description of Artificial Sequence: Synthetic oligonucleotide
ctgtgtttactcagccttcatt

SEQ ID NO: 1337 - DNA, 22 bp, Artificial Sequence
  Description of Artificial Sequence: Synthetic oligonucleotide
tgtgtttactcagccttcattt

SEQ ID NO: 1338 - DNA, 22 bp, Artificial Sequence
  Description of Artificial Sequence: Synthetic oligonucleotide
gtgtttactcagccttcatttc

SEQ ID NO: 1339 - DNA, 22 bp, Artificial Sequence
  Description of Artificial Sequence: Synthetic oligonucleotide
tgtttactcagccttcatttca

SEQ ID NO: 1340 - DNA, 22 bp, Artificial Sequence
  Description of Artificial Sequence: Synthetic oligonucleotide
gtttactcagccttcatttcag

SEQ ID NO: 1341 - DNA, 22 bp, Artificial Sequence
  Description of Artificial Sequence: Synthetic oligonucleotide
tttactcagccttcatttcaga

SEQ ID NO: 1342 - DNA, 22 bp, Artificial Sequence
  Description of Artificial Sequence: Synthetic oligonucleotide
ttactcagccttcatttcagaa

SEQ ID NO: 1343 - DNA, 22 bp, Artificial Sequence
  Description of Artificial Sequence: Synthetic oligonucleotide
tactcagccttcatttcagaaa

SEQ ID NO: 1344 - DNA, 22 bp, Artificial Sequence
  Description of Artificial Sequence: Synthetic oligonucleotide
actcagccttcatttcagaaaa

SEQ ID NO: 1345 - DNA, 22 bp, Artificial Sequence
  Description of Artificial Sequence: Synthetic oligonucleotide
ctcagccttcatttcagaaaat

SEQ ID NO: 1346 - DNA, 22 bp, Artificial Sequence
  Description of Artificial Sequence: Synthetic oligonucleotide
tcagccttcatttcagaaaatc

SEQ ID NO: 1347 - DNA, 22 bp, Artificial Sequence
  Description of Artificial Sequence: Synthetic oligonucleotide
cagccttcatttcagaaaatct

SEQ ID NO: 1348 - DNA, 22 bp, Artificial Sequence
  Description of Artificial Sequence: Synthetic oligonucleotide
agccttcatttcagaaaatctg

SEQ ID NO: 1349 - DNA, 22 bp, Artificial Sequence
  Description of Artificial Sequence: Synthetic oligonucleotide
gccttcatttcagaaaatctgc

SEQ ID NO: 1350 - DNA, 22 bp, Artificial Sequence
  Description of Artificial Sequence: Synthetic oligonucleotide
ccttcatttcagaaaatctgcc

SEQ ID NO: 1351 - DNA, 22 bp, Artificial Sequence
  Description of Artificial Sequence: Synthetic oligonucleotide
cttcatttcagaaaatctgcca

SEQ ID NO: 1352 - DNA, 22 bp, Artificial Sequence
  Description of Artificial Sequence: Synthetic oligonucleotide
ttcatttcagaaaatctgccat

SEQ ID NO: 1353 - DNA, 22 bp, Artificial Sequence
  Description of Artificial Sequence: Synthetic oligonucleotide
tcatttcagaaaatctgccatc

SEQ ID NO: 1354 - DNA, 22 bp, Artificial Sequence
  Description of Artificial Sequence: Synthetic oligonucleotide
catttcagaaaatctgccatct

SEQ ID NO: 1355 - DNA, 22 bp, Artificial Sequence
  Description of Artificial Sequence: Synthetic oligonucleotide
atttcagaaaatctgccatctg

SEQ ID NO: 1356 - DNA, 22 bp, Artificial Sequence
  Description of Artificial Sequence: Synthetic oligonucleotide
tttcagaaaatctgccatctgc

SEQ ID NO: 1357 - DNA, 22 bp, Artificial Sequence
  Description of Artificial Sequence: Synthetic oligonucleotide
ttcagaaaatctgccatctgct

SEQ ID NO: 1358 - DNA, 22 bp, Artificial Sequence
  Description of Artificial Sequence: Synthetic oligonucleotide
tcagaaaatctgccatctgctt

SEQ ID NO: 1359 - DNA, 22 bp, Artificial Sequence
  Description of Artificial Sequence: Synthetic oligonucleotide
cagaaaatctgccatctgcttc

SEQ ID NO: 1360 - DNA, 22 bp, Artificial Sequence
  Description of Artificial Sequence: Synthetic oligonucleotide
agaaaatctgccatctgcttct

SEQ ID NO: 1361 - DNA, 22 bp, Artificial Sequence
  Description of Artificial Sequence: Synthetic oligonucleotide
gaaaatctgccatctgcttctg

SEQ ID NO: 1362 - DNA, 22 bp, Artificial Sequence
  Description of Artificial Sequence: Synthetic oligonucleotide
aaaatctgccatctgcttctgg

SEQ ID NO: 1363 - DNA, 22 bp, Artificial Sequence
  Description of Artificial Sequence: Synthetic oligonucleotide
aaatctgccatctgcttctggg

SEQ ID NO: 1364 - DNA, 22 bp, Artificial Sequence
  Description of Artificial Sequence: Synthetic oligonucleotide
aatctgccatctgcttctggga

SEQ ID NO: 1365 - DNA, 22 bp, Artificial Sequence
  Description of Artificial Sequence: Synthetic oligonucleotide
atctgccatctgcttctgggat

SEQ ID NO: 1366 - DNA, 22 bp, Artificial Sequence
  Description of Artificial Sequence: Synthetic oligonucleotide
tctgccatctgcttctgggatt

SEQ ID NO: 1367 - DNA, 22 bp, Artificial Sequence
  Description of Artificial Sequence: Synthetic oligonucleotide
ctgccatctgcttctgggattg

SEQ ID NO: 1368 - DNA, 22 bp, Artificial Sequence
  Description of Artificial Sequence: Synthetic oligonucleotide
tgccatctgcttctgggattgc

SEQ ID NO: 1369 - DNA, 22 bp, Artificial Sequence
  Description of Artificial Sequence: Synthetic oligonucleotide
gccatctgcttctgggattgct

SEQ ID NO: 1370 - DNA, 22 bp, Artificial Sequence
  Description of Artificial Sequence: Synthetic oligonucleotide
ccatctgcttctgggattgctt

SEQ ID NO: 1371 - DNA, 22 bp, Artificial Sequence
  Description of Artificial Sequence: Synthetic oligonucleotide
catctgcttctgggattgctta

SEQ ID NO: 1372 - DNA, 22 bp, Artificial Sequence
  Description of Artificial Sequence: Synthetic oligonucleotide
atctgcttctgggattgcttaa

SEQ ID NO: 1373 - DNA, 22 bp, Artificial Sequence
  Description of Artificial Sequence: Synthetic oligonucleotide
tctgcttctgggattgcttaag

SEQ ID NO: 1374 - DNA, 22 bp, Artificial Sequence
  Description of Artificial Sequence: Synthetic oligonucleotide
ctgcttctgggattgcttaagc

SEQ ID NO: 1375 - DNA, 22 bp, Artificial Sequence
  Description of Artificial Sequence: Synthetic oligonucleotide
tgcttctgggattgcttaagcc

SEQ ID NO: 1376 - DNA, 22 bp, Artificial Sequence
  Description of Artificial Sequence: Synthetic oligonucleotide
gcttctgggattgcttaagccc

SEQ ID NO: 1377 - DNA, 22 bp, Artificial Sequence
  Description of Artificial Sequence: Synthetic oligonucleotide
cttctgggattgcttaagccct

SEQ ID NO: 1378 - DNA, 22 bp, Artificial Sequence
  Description of Artificial Sequence: Synthetic oligonucleotide
ttctgggattgcttaagccctg

SEQ ID NO: 1379 - DNA, 22 bp, Artificial Sequence
  Description of Artificial Sequence: Synthetic oligonucleotide
tctgggattgcttaagccctgt

SEQ ID NO: 1380 - DNA, 22 bp, Artificial Sequence
  Description of Artificial Sequence: Synthetic oligonucleotide
ctgggattgcttaagccctgtg

SEQ ID NO: 1381 - DNA, 22 bp, Artificial Sequence
  Description of Artificial Sequence: Synthetic oligonucleotide
tgggattgcttaagccctgtgg

SEQ ID NO: 1382 - DNA, 22 bp, Artificial Sequence
  Description of Artificial Sequence: Synthetic oligonucleotide
gggattgcttaagccctgtggg

SEQ ID NO: 1383 - DNA, 22 bp, Artificial Sequence
  Description of Artificial Sequence: Synthetic oligonucleotide
ggattgcttaagccctgtgggt

SEQ ID NO: 1384 - DNA, 22 bp, Artificial Sequence
  Description of Artificial Sequence: Synthetic oligonucleotide
gattgcttaagccctgtgggtg

SEQ ID NO: 1385 - DNA, 22 bp, Artificial Sequence
  Description of Artificial Sequence: Synthetic oligonucleotide
attgcttaagccctgtgggtgt

SEQ ID NO: 1386 - DNA, 22 bp, Artificial Sequence
  Description of Artificial Sequence: Synthetic oligonucleotide
ttgcttaagccctgtgggtgtc

SEQ ID NO: 1387 - DNA, 22 bp, Artificial Sequence
  Description of Artificial Sequence: Synthetic oligonucleotide
tgcttaagccctgtgggtgtcc

SEQ ID NO: 1388 - DNA, 22 bp, Artificial Sequence
  Description of Artificial Sequence: Synthetic oligonucleotide
gcttaagccctgtgggtgtcct

SEQ ID NO: 1389 - DNA, 22 bp, Artificial Sequence
  Description of Artificial Sequence: Synthetic oligonucleotide
cttaagccctgtgggtgtcctg

SEQ ID NO: 1390 - DNA, 22 bp, Artificial Sequence
  Description of Artificial Sequence: Synthetic oligonucleotide
ttaagccctgtgggtgtcctgg

SEQ ID NO: 1391 - DNA, 22 bp, Artificial Sequence
  Description of Artificial Sequence: Synthetic oligonucleotide
taagccctgtgggtgtcctggt

SEQ ID NO: 1392 - DNA, 22 bp, Artificial Sequence
  Description of Artificial Sequence: Synthetic oligonucleotide
aagccctgtgggtgtcctggtc

SEQ ID NO: 1393 - DNA, 22 bp, Artificial Sequence
  Description of Artificial Sequence: Synthetic oligonucleotide
agccctgtgggtgtcctggtca

SEQ ID NO: 1394 - DNA, 22 bp, Artificial Sequence
  Description of Artificial Sequence: Synthetic oligonucleotide
gccctgtgggtgtcctggtcat

SEQ ID NO: 1395 - DNA, 22 bp, Artificial Sequence
  Description of Artificial Sequence: Synthetic oligonucleotide
ccctgtgggtgtcctggtcatt

SEQ ID NO: 1396 - DNA, 22 bp, Artificial Sequence
  Description of Artificial Sequence: Synthetic oligonucleotide
cctgtgggtgtcctggtcattg

SEQ ID NO: 1397 - DNA, 22 bp, Artificial Sequence
  Description of Artificial Sequence: Synthetic oligonucleotide
ctgtgggtgtcctggtcattgg

SEQ ID NO: 1398 - DNA, 22 bp, Artificial Sequence
  Description of Artificial Sequence: Synthetic oligonucleotide
tgtgggtgtcctggtcattggt

SEQ ID NO: 1399 - DNA, 16 bp, Artificial Sequence
  Description of Artificial Sequence: Synthetic oligonucleotide
ggtcatcagcgactgc

SEQ ID NO: 1400 - DNA, 16 bp, Artificial Sequence
  Description of Artificial Sequence: Synthetic oligonucleotide
gtcatcagcgactgct

SEQ ID NO: 1401 - DNA, 16 bp, Artificial Sequence
  Description of Artificial Sequence: Synthetic oligonucleotide
tcatcagcgactgctg

SEQ ID NO: 1402 - DNA, 16 bp, Artificial Sequence
  Description of Artificial Sequence: Synthetic oligonucleotide
catcagcgactgctgg

SEQ ID NO: 1403 - DNA, 16 bp, Artificial Sequence
  Description of Artificial Sequence: Synthetic oligonucleotide
atcagcgactgctggc

SEQ ID NO: 1404 - DNA, 16 bp, Artificial Sequence
  Description of Artificial Sequence: Synthetic oligonucleotide
tcagcgactgctggct

SEQ ID NO: 1405 - DNA, 16 bp, Artificial Sequence
  Description of Artificial Sequence: Synthetic oligonucleotide
cagcgactgctggctt

SEQ ID NO: 1406 - DNA, 16 bp, Artificial Sequence
  Description of Artificial Sequence: Synthetic oligonucleotide
agcgactgctggcttt

SEQ ID NO: 1407 - DNA, 16 bp, Artificial Sequence
  Description of Artificial Sequence: Synthetic oligonucleotide
gcgactgctggctttg

SEQ ID NO: 1408 - DNA, 16 bp, Artificial Sequence
  Description of Artificial Sequence: Synthetic oligonucleotide
cgactgctggctttgt

SEQ ID NO: 1409 - DNA, 16 bp, Artificial Sequence
  Description of Artificial Sequence: Synthetic oligonucleotide
gactgctggctttgtc

SEQ ID NO: 1410 - DNA, 16 bp, Artificial Sequence
  Description of Artificial Sequence: Synthetic oligonucleotide
actgctggctttgtct

SEQ ID NO: 1411 - DNA, 16 bp, Artificial Sequence
  Description of Artificial Sequence: Synthetic oligonucleotide
ctgctggctttgtctg

SEQ ID NO: 1412 - DNA, 16 bp, Artificial Sequence
  Description of Artificial Sequence: Synthetic oligonucleotide
tgctggctttgtctgg

SEQ ID NO: 1413 - DNA, 16 bp, Artificial Sequence
  Description of Artificial Sequence: Synthetic oligonucleotide
gctggctttgtctgga

SEQ ID NO: 1414 - DNA, 16 bp, Artificial Sequence
  Description of Artificial Sequence: Synthetic oligonucleotide
ctggctttgtctggat

SEQ ID NO: 1415 - DNA, 16 bp, Artificial Sequence
  Description of Artificial Sequence: Synthetic oligonucleotide
tggctttgtctggata

SEQ ID NO: 1416 - DNA, 16 bp, Artificial Sequence
  Description of Artificial Sequence: Synthetic oligonucleotide
ggctttgtctggatag

SEQ ID NO: 1417 - DNA, 16 bp, Artificial Sequence
  Description of Artificial Sequence: Synthetic oligonucleotide
gctttgtctggatagg

SEQ ID NO: 1418 - DNA, 16 bp, Artificial Sequence
  Description of Artificial Sequence: Synthetic oligonucleotide
ctttgtctggataggg

SEQ ID NO: 1419 - DNA, 16 bp, Artificial Sequence
  Description of Artificial Sequence: Synthetic oligonucleotide
tttgtctggatagggt

SEQ ID NO: 1420 - DNA, 16 bp, Artificial Sequence
  Description of Artificial Sequence: Synthetic oligonucleotide
ttgtctggatagggtg

SEQ ID NO: 1421 - DNA, 16 bp, Artificial Sequence
  Description of Artificial Sequence: Synthetic oligonucleotide
tgtctggatagggtgg

SEQ ID NO: 1422 - DNA, 16 bp, Artificial Sequence
  Description of Artificial Sequence: Synthetic oligonucleotide
gtctggatagggtggg

SEQ ID NO: 1423 - DNA, 16 bp, Artificial Sequence
  Description of Artificial Sequence: Synthetic oligonucleotide
tctggatagggtgggt

SEQ ID NO: 1424 - DNA, 16 bp, Artificial Sequence
  Description of Artificial Sequence: Synthetic oligonucleotide
ctggatagggtgggtt

SEQ ID NO: 1425 - DNA, 16 bp, Artificial Sequence
  Description of Artificial Sequence: Synthetic oligonucleotide
tggatagggtgggttt

SEQ ID NO: 1426 - DNA, 16 bp, Artificial Sequence
  Description of Artificial Sequence: Synthetic oligonucleotide
ggatagggtgggtttc

SEQ ID NO: 1427 - DNA, 16 bp, Artificial Sequence
  Description of Artificial Sequence: Synthetic oligonucleotide
gatagggtgggtttca

SEQ ID NO: 1428 - DNA, 16 bp, Artificial Sequence
  Description of Artificial Sequence: Synthetic oligonucleotide
atagggtgggtttcag

SEQ ID NO: 1429 - DNA, 16 bp, Artificial Sequence
  Description of Artificial Sequence: Synthetic oligonucleotide
tagggtgggtttcagg

SEQ ID NO: 1430 - DNA, 16 bp, Artificial Sequence
  Description of Artificial Sequence: Synthetic oligonucleotide
agggtgggtttcaggg

SEQ ID NO: 1431 - DNA, 16 bp, Artificial Sequence
  Description of Artificial Sequence: Synthetic oligonucleotide
gggtgggtttcaggga

SEQ ID NO: 1432 - DNA, 16 bp, Artificial Sequence
  Description of Artificial Sequence: Synthetic oligonucleotide
ggtgggtttcagggat

SEQ ID NO: 1433 - DNA, 16 bp, Artificial Sequence
  Description of Artificial Sequence: Synthetic oligonucleotide
gtgggtttcagggatt

SEQ ID NO: 1434 - DNA, 16 bp, Artificial Sequence
  Description of Artificial Sequence: Synthetic oligonucleotide
tgggtttcagggattc

SEQ ID NO: 1435 - DNA, 16 bp, Artificial Sequence
  Description of Artificial Sequence: Synthetic oligonucleotide
gggtttcagggattct

SEQ ID NO: 1436 - DNA, 16 bp, Artificial Sequence
  Description of Artificial Sequence: Synthetic oligonucleotide
ggtttcagggattctg

SEQ ID NO: 1437 - DNA, 16 bp, Artificial Sequence
  Description of Artificial Sequence: Synthetic oligonucleotide
gtttcagggattctga

SEQ ID NO: 1438 - DNA, 16 bp, Artificial Sequence
  Description of Artificial Sequence: Synthetic oligonucleotide
tttcagggattctgat

SEQ ID NO: 1439 - DNA, 16 bp, Artificial Sequence
  Description of Artificial Sequence: Synthetic oligonucleotide
ttcagggattctgatc

SEQ ID NO: 1440 - DNA, 16 bp, Artificial Sequence
  Description of Artificial Sequence: Synthetic oligonucleotide
tcagggattctgatct

SEQ ID NO: 1441 - DNA, 16 bp, Artificial Sequence
  Description of Artificial Sequence: Synthetic oligonucleotide
cagggattctgatctc

SEQ ID NO: 1442 - DNA, 16 bp, Artificial Sequence
  Description of Artificial Sequence: Synthetic oligonucleotide
agggattctgatctca

SEQ ID NO: 1443 - DNA, 16 bp, Artificial Sequence
  Description of Artificial Sequence: Synthetic oligonucleotide
gggattctgatctcac

SEQ ID NO: 1444 - DNA, 16 bp, Artificial Sequence
  Description of Artificial Sequence: Synthetic oligonucleotide
ggattctgatctcacg

SEQ ID NO: 1445 - DNA, 16 bp, Artificial Sequence
  Description of Artificial Sequence: Synthetic oligonucleotide
gattctgatctcacgt

SEQ ID NO: 1446 - DNA, 16 bp, Artificial Sequence
  Description of Artificial Sequence: Synthetic oligonucleotide
attctgatctcacgtc

SEQ ID NO: 1447 - DNA, 16 bp, Artificial Sequence
  Description of Artificial Sequence: Synthetic oligonucleotide
ttctgatctcacgtca

SEQ ID NO: 1448 - DNA, 16 bp, Artificial Sequence
  Description of Artificial Sequence: Synthetic oligonucleotide
tctgatctcacgtcac

SEQ ID NO: 1449 - DNA, 16 bp, Artificial Sequence
  Description of Artificial Sequence: Synthetic oligonucleotide
ctgatctcacgtcacc

SEQ ID NO: 1450 - DNA, 16 bp, Artificial Sequence
  Description of Artificial Sequence: Synthetic oligonucleotide
tgatctcacgtcacct

SEQ ID NO: 1451 - DNA, 16 bp, Artificial Sequence
  Description of Artificial Sequence: Synthetic oligonucleotide
gatctcacgtcacctg

SEQ ID NO: 1452 - DNA, 16 bp, Artificial Sequence
  Description of Artificial Sequence: Synthetic oligonucleotide
atctcacgtcacctgc

SEQ ID NO: 1453 - DNA, 16 bp, Artificial Sequence
  Description of Artificial Sequence: Synthetic oligonucleotide
tctcacgtcacctgcc

SEQ ID NO: 1454 - DNA, 16 bp, Artificial Sequence
  Description of Artificial Sequence: Synthetic oligonucleotide
ctcacgtcacctgcct

SEQ ID NO: 1455 - DNA, 16 bp, Artificial Sequence
  Description of Artificial Sequence: Synthetic oligonucleotide
tcacgtcacctgcctt

SEQ ID NO: 1456 - DNA, 16 bp, Artificial Sequence
  Description of Artificial Sequence: Synthetic oligonucleotide
cacgtcacctgcctta

SEQ ID NO: 1457 - DNA, 16 bp, Artificial Sequence
  Description of Artificial Sequence: Synthetic oligonucleotide
acgtcacctgccttac

SEQ ID NO: 1458 - DNA, 16 bp, Artificial Sequence
  Description of Artificial Sequence: Synthetic oligonucleotide
cgtcacctgccttaca

SEQ ID NO: 1459 - DNA, 16 bp, Artificial Sequence
  Description of Artificial Sequence: Synthetic oligonucleotide
gtcacctgccttacag

SEQ ID NO: 1460 - DNA, 16 bp, Artificial Sequence
  Description of Artificial Sequence: Synthetic oligonucleotide
tcacctgccttacagc

SEQ ID NO: 1461 - DNA, 16 bp, Artificial Sequence
  Description of Artificial Sequence: Synthetic oligonucleotide
cacctgccttacagcg

SEQ ID NO: 1462 - DNA, 16 bp, Artificial Sequence
  Description of Artificial Sequence: Synthetic oligonucleotide
acctgccttacagcgc

SEQ ID NO: 1463 - DNA, 16 bp, Artificial Sequence
  Description of Artificial Sequence: Synthetic oligonucleotide
cctgccttacagcgct

SEQ ID NO: 1464 - DNA, 16 bp, Artificial Sequence
  Description of Artificial Sequence: Synthetic oligonucleotide
ctgccttacagcgctg

SEQ ID NO: 1465 - DNA, 16 bp, Artificial Sequence
  Description of Artificial Sequence: Synthetic oligonucleotide
tgccttacagcgctgc

SEQ ID NO: 1466 - DNA, 16 bp, Artificial Sequence
  Description of Artificial Sequence: Synthetic oligonucleotide
gccttacagcgctgcc

SEQ ID NO: 1467 - DNA, 16 bp, Artificial Sequence
  Description of Artificial Sequence: Synthetic oligonucleotide
ccttacagcgctgcca

SEQ ID NO: 1468 - DNA, 16 bp, Artificial Sequence
  Description of Artificial Sequence: Synthetic oligonucleotide
cttacagcgctgccac

SEQ ID NO: 1469 - DNA, 16 bp, Artificial Sequence
  Description of Artificial Sequence: Synthetic oligonucleotide
ttacagcgctgccaca

SEQ ID NO: 1470 - DNA, 16 bp, Artificial Sequence
  Description of Artificial Sequence: Synthetic oligonucleotide
tacagcgctgccacag

SEQ ID NO: 1471 - DNA, 16 bp, Artificial Sequence
  Description of Artificial Sequence: Synthetic oligonucleotide
acagcgctgccacagc

SEQ ID NO: 1472 - DNA, 16 bp, Artificial Sequence
  Description of Artificial Sequence: Synthetic oligonucleotide
cagcgctgccacagca

SEQ ID NO: 1473 - DNA, 16 bp, Artificial Sequence
  Description of Artificial Sequence: Synthetic oligonucleotide
agcgctgccacagcag

SEQ ID NO: 1474 - DNA, 16 bp, Artificial Sequence
  Description of Artificial Sequence: Synthetic oligonucleotide
gcgctgccacagcagt

SEQ ID NO: 1475 - DNA, 16 bp, Artificial Sequence
  Description of Artificial Sequence: Synthetic oligonucleotide
cgctgccacagcagtg

SEQ ID NO: 1476 - DNA, 16 bp, Artificial Sequence
  Description of Artificial Sequence: Synthetic oligonucleotide
gctgccacagcagtgg

SEQ ID NO: 1477 - DNA, 16 bp, Artificial Sequence
  Description of Artificial Sequence: Synthetic oligonucleotide
ctgccacagcagtggg

SEQ ID NO: 1478 - DNA, 16 bp, Artificial Sequence
  Description of Artificial Sequence: Synthetic oligonucleotide
tgccacagcagtgggc

SEQ ID NO: 1479 - DNA, 16 bp, Artificial Sequence
  Description of Artificial Sequence: Synthetic oligonucleotide
gccacagcagtgggcc

SEQ ID NO: 1480 - DNA, 16 bp, Artificial Sequence
  Description of Artificial Sequence: Synthetic oligonucleotide
ccacagcagtgggccc

SEQ ID NO: 1481 - DNA, 16 bp, Artificial Sequence
  Description of Artificial Sequence: Synthetic oligonucleotide
cacagcagtgggccct

SEQ ID NO: 1482 - DNA, 16 bp, Artificial Sequence
  Description of Artificial Sequence: Synthetic oligonucleotide
acagcagtgggccctg

SEQ ID NO: 1483 - DNA, 16 bp, Artificial Sequence
  Description of Artificial Sequence: Synthetic oligonucleotide
cagcagtgggccctga

SEQ ID NO: 1484 - DNA, 16 bp, Artificial Sequence
  Description of Artificial Sequence: Synthetic oligonucleotide
agcagtgggccctgat

SEQ ID NO: 1485 - DNA, 16 bp, Artificial Sequence
  Description of Artificial Sequence: Synthetic oligonucleotide
gcagtgggccctgatt

SEQ ID NO: 1486 - DNA, 16 bp, Artificial Sequence
  Description of Artificial Sequence: Synthetic oligonucleotide
cagtgggccctgattc

SEQ ID NO: 1487 - DNA, 16 bp, Artificial Sequence
  Description of Artificial Sequence: Synthetic oligonucleotide
agtgggccctgattca

SEQ ID NO: 1488 - DNA, 16 bp, Artificial Sequence
  Description of Artificial Sequence: Synthetic oligonucleotide
gtgggccctgattcag

SEQ ID NO: 1489 - DNA, 16 bp, Artificial Sequence
  Description of Artificial Sequence: Synthetic oligonucleotide
tgggccctgattcaga

SEQ ID NO: 1490 - DNA, 16 bp, Artificial Sequence
  Description of Artificial Sequence: Synthetic oligonucleotide
gggccctgattcagac

SEQ ID NO: 1491 - DNA, 16 bp, Artificial Sequence
  Description of Artificial Sequence: Synthetic oligonucleotide
ggccctgattcagaca

SEQ ID NO: 1492 - DNA, 16 bp, Artificial Sequence
  Description of Artificial Sequence: Synthetic oligonucleotide
gccctgattcagacag

SEQ ID NO: 1493 - DNA, 16 bp, Artificial Sequence
  Description of Artificial Sequence: Synthetic oligonucleotide
ccctgattcagacagc

SEQ ID NO: 1494 - DNA, 16 bp, Artificial Sequence
  Description of Artificial Sequence: Synthetic oligonucleotide
cctgattcagacagca

SEQ ID NO: 1495 - DNA, 16 bp, Artificial Sequence
  Description of Artificial Sequence: Synthetic oligonucleotide
ctgattcagacagcag

SEQ ID NO: 1496 - DNA, 16 bp, Artificial Sequence
  Description of Artificial Sequence: Synthetic oligonucleotide
tgattcagacagcagg

SEQ ID NO: 1497 - DNA, 16 bp, Artificial Sequence
  Description of Artificial Sequence: Synthetic oligonucleotide
tggtcatcagcgactg

SEQ ID NO: 1498 - DNA, 16 bp, Artificial Sequence
  Description of Artificial Sequence: Synthetic oligonucleotide
gattcagacagcaggg

SEQ ID NO: 1499 - DNA, 16 bp, Artificial Sequence
  Description of Artificial Sequence: Synthetic oligonucleotide
attcagacagcagggg

SEQ ID NO: 1500 - DNA, 16 bp, Artificial Sequence
  Description of Artificial Sequence: Synthetic oligonucleotide
ttcagacagcaggggg

SEQ ID NO: 1501 - DNA, 16 bp, Artificial Sequence
  Description of Artificial Sequence: Synthetic oligonucleotide
tcagacagcagggggt

SEQ ID NO: 1502 - DNA, 16 bp, Artificial Sequence
  Description of Artificial Sequence: Synthetic oligonucleotide
cagacagcagggggtc

SEQ ID NO: 1503 - DNA, 16 bp, Artificial Sequence
  Description of Artificial Sequence: Synthetic oligonucleotide
agacagcagggggtca

SEQ ID NO: 1504 - DNA, 16 bp, Artificial Sequence
  Description of Artificial Sequence: Synthetic oligonucleotide
gacagcagggggtcat

SEQ ID NO: 1505 - DNA, 16 bp, Artificial Sequence
  Description of Artificial Sequence: Synthetic oligonucleotide
acagcagggggtcatc

SEQ ID NO: 1506 - DNA, 16 bp, Artificial Sequence
  Description of Artificial Sequence: Synthetic oligonucleotide
cagcagggggtcatcc

SEQ ID NO: 1507 - DNA, 16 bp, Artificial Sequence
  Description of Artificial Sequence: Synthetic oligonucleotide
agcagggggtcatccc

SEQ ID NO: 1508 - DNA, 16 bp, Artificial Sequence
  Description of Artificial Sequence: Synthetic oligonucleotide
gcagggggtcatcccc

SEQ ID NO: 1509 - DNA, 16 bp, Artificial Sequence
  Description of Artificial Sequence: Synthetic oligonucleotide
cagggggtcatcccct

SEQ ID NO: 1510 - DNA, 16 bp, Artificial Sequence
  Description of Artificial Sequence: Synthetic oligonucleotide
agggggtcatccccta

SEQ ID NO: 1511 - DNA, 16 bp, Artificial Sequence
  Description of Artificial Sequence: Synthetic oligonucleotide
gggggtcatcccctaa

SEQ ID NO: 1512 - DNA, 16 bp, Artificial Sequence
  Description of Artificial Sequence: Synthetic oligonucleotide
ggggtcatcccctaag

SEQ ID NO: 1513 - DNA, 16 bp, Artificial Sequence
  Description of Artificial Sequence: Synthetic oligonucleotide
gggtcatcccctaagt

SEQ ID NO: 1514 - DNA, 16 bp, Artificial Sequence
  Description of Artificial Sequence: Synthetic oligonucleotide
ggtcatcccctaagtg

SEQ ID NO: 1515 - DNA, 17 bp, Artificial Sequence
  Description of Artificial Sequence: Synthetic oligonucleotide
ggtcatcagcgactgct

SEQ ID NO: 1516 - DNA, 17 bp, Artificial Sequence
  Description of Artificial Sequence: Synthetic oligonucleotide
gtcatcagcgactgctg

SEQ ID NO: 1517 - DNA, 17 bp, Artificial Sequence
  Description of Artificial Sequence: Synthetic oligonucleotide
tcatcagcgactgctgg

SEQ ID NO: 1518 - DNA, 17 bp, Artificial Sequence
  Description of Artificial Sequence: Synthetic oligonucleotide
catcagcgactgctggc

SEQ ID NO: 1519 - DNA, 17 bp, Artificial Sequence
  Description of Artificial Sequence: Synthetic oligonucleotide
atcagcgactgctggct

SEQ ID NO: 1520 - DNA, 17 bp, Artificial Sequence
  Description of Artificial Sequence: Synthetic oligonucleotide
tcagcgactgctggctt

SEQ ID NO: 1521 - DNA, 17 bp, Artificial Sequence
  Description of Artificial Sequence: Synthetic oligonucleotide
cagcgactgctggcttt

SEQ ID NO: 1522 - DNA, 17 bp, Artificial Sequence
  Description of Artificial Sequence: Synthetic oligonucleotide
agcgactgctggctttg

SEQ ID NO: 1523 - DNA, 17 bp, Artificial Sequence
  Description of Artificial Sequence: Synthetic oligonucleotide
gcgactgctggctttgt

SEQ ID NO: 1524 - DNA, 17 bp, Artificial Sequence
  Description of Artificial Sequence: Synthetic oligonucleotide
cgactgctggctttgtc

SEQ ID NO: 1525 - DNA, 17 bp, Artificial Sequence
  Description of Artificial Sequence: Synthetic oligonucleotide
gactgctggctttgtct

SEQ ID NO: 1526 - DNA, 17 bp, Artificial Sequence
  Description of Artificial Sequence: Synthetic oligonucleotide
actgctggctttgtctg

SEQ ID NO: 1527 - DNA, 17 bp, Artificial Sequence
  Description of Artificial Sequence: Synthetic oligonucleotide
ctgctggctttgtctgg

SEQ ID NO: 1528 - DNA, 17 bp, Artificial Sequence
  Description of Artificial Sequence: Synthetic oligonucleotide
tgctggctttgtctgga

SEQ ID NO: 1529 - DNA, 17 bp, Artificial Sequence
  Description of Artificial Sequence: Synthetic oligonucleotide
gctggctttgtctggat

SEQ ID NO: 1530 - DNA, 17 bp, Artificial Sequence
  Description of Artificial Sequence: Synthetic oligonucleotide
ctggctttgtctggata

SEQ ID NO: 1531 - DNA, 17 bp, Artificial Sequence
  Description of Artificial Sequence: Synthetic oligonucleotide
tggctttgtctggatag

SEQ ID NO: 1532 - DNA, 17 bp, Artificial Sequence
  Description of Artificial Sequence: Synthetic oligonucleotide
ggctttgtctggatagg

SEQ ID NO: 1533 - DNA, 17 bp, Artificial Sequence
  Description of Artificial Sequence: Synthetic oligonucleotide
gctttgtctggataggg

SEQ ID NO: 1534 - DNA, 17 bp, Artificial Sequence
  Description of Artificial Sequence: Synthetic oligonucleotide
ctttgtctggatagggt

SEQ ID NO: 1535 - DNA, 17 bp, Artificial Sequence
  Description of Artificial Sequence: Synthetic oligonucleotide
tttgtctggatagggtg

SEQ ID NO: 1536 - DNA, 17 bp, Artificial Sequence
  Description of Artificial Sequence: Synthetic oligonucleotide
ttgtctggatagggtgg

SEQ ID NO: 1537 - DNA, 17 bp, Artificial Sequence
  Description of Artificial Sequence: Synthetic oligonucleotide
tgtctggatagggtggg

SEQ ID NO: 1538 - DNA, 17 bp, Artificial Sequence
  Description of Artificial Sequence: Synthetic oligonucleotide
gtctggatagggtgggt

SEQ ID NO: 1539 - DNA, 17 bp, Artificial Sequence
  Description of Artificial Sequence: Synthetic oligonucleotide
tctggatagggtgggtt

SEQ ID NO: 1540 - DNA, 17 bp, Artificial Sequence
  Description of Artificial Sequence: Synthetic oligonucleotide
ctggatagggtgggttt

SEQ ID NO: 1541 - DNA, 17 bp, Artificial Sequence
  Description of Artificial Sequence: Synthetic oligonucleotide
tggatagggtgggtttc

SEQ ID NO: 1542 - DNA, 17 bp, Artificial Sequence
  Description of Artificial Sequence: Synthetic oligonucleotide
ggatagggtgggtttca

SEQ ID NO: 1543 - DNA, 17 bp, Artificial Sequence
  Description of Artificial Sequence: Synthetic oligonucleotide
gatagggtgggtttcag

SEQ ID NO: 1544 - DNA, 17 bp, Artificial Sequence
  Description of Artificial Sequence: Synthetic oligonucleotide
atagggtgggtttcagg

SEQ ID NO: 1545 - DNA, 17 bp, Artificial Sequence
  Description of Artificial Sequence: Synthetic oligonucleotide
tagggtgggtttcaggg

SEQ ID NO: 1546 - DNA, 17 bp, Artificial Sequence
  Description of Artificial Sequence: Synthetic oligonucleotide
agggtgggtttcaggga

SEQ ID NO: 1547 - DNA, 17 bp, Artificial Sequence
  Description of Artificial Sequence: Synthetic oligonucleotide
gggtgggtttcagggat

SEQ ID NO: 1548 - DNA, 17 bp, Artificial Sequence
  Description of Artificial Sequence: Synthetic oligonucleotide
ggtgggtttcagggatt

SEQ ID NO: 1549 - DNA, 17 bp, Artificial Sequence
  Description of Artificial Sequence: Synthetic oligonucleotide
gtgggtttcagggattc

SEQ ID NO: 1550 - DNA, 17 bp, Artificial Sequence
  Description of Artificial Sequence: Synthetic oligonucleotide
tgggtttcagggattct

SEQ ID NO: 1551 - DNA, 17 bp, Artificial Sequence
  Description of Artificial Sequence: Synthetic oligonucleotide
gggtttcagggattctg

SEQ ID NO: 1552 - DNA, 17 bp, Artificial Sequence
  Description of Artificial Sequence: Synthetic oligonucleotide
ggtttcagggattctga

SEQ ID NO: 1553 - DNA, 17 bp, Artificial Sequence
  Description of Artificial Sequence: Synthetic oligonucleotide
gtttcagggattctgat

SEQ ID NO: 1554 - DNA, 17 bp, Artificial Sequence
  Description of Artificial Sequence: Synthetic oligonucleotide
tttcagggattctgatc

SEQ ID NO: 1555 - DNA, 17 bp, Artificial Sequence
  Description of Artificial Sequence: Synthetic oligonucleotide
ttcagggattctgatct

SEQ ID NO: 1556 - DNA, 17 bp, Artificial Sequence
  Description of Artificial Sequence: Synthetic oligonucleotide
tcagggattctgatctc

SEQ ID NO: 1557 - DNA, 17 bp, Artificial Sequence
  Description of Artificial Sequence: Synthetic oligonucleotide
cagggattctgatctca

SEQ ID NO: 1558 - DNA, 17 bp, Artificial Sequence
  Description of Artificial Sequence: Synthetic oligonucleotide
agggattctgatctcac

SEQ ID NO: 1559 - DNA, 17 bp, Artificial Sequence
  Description of Artificial Sequence: Synthetic oligonucleotide
gggattctgatctcacg

SEQ ID NO: 1560 - DNA, 17 bp, Artificial Sequence
  Description of Artificial Sequence: Synthetic oligonucleotide
ggattctgatctcacgt

SEQ ID NO: 1561 - DNA, 17 bp, Artificial Sequence
  Description of Artificial Sequence: Synthetic oligonucleotide
gattctgatctcacgtc

SEQ ID NO: 1562 - DNA, 17 bp, Artificial Sequence
  Description of Artificial Sequence: Synthetic oligonucleotide
attctgatctcacgtca

SEQ ID NO: 1563 - DNA, 17 bp, Artificial Sequence
  Description of Artificial Sequence: Synthetic oligonucleotide
ttctgatctcacgtcac

SEQ ID NO: 1564 - DNA, 17 bp, Artificial Sequence
  Description of Artificial Sequence: Synthetic oligonucleotide
tctgatctcacgtcacc

SEQ ID NO: 1565 - DNA, 17 bp, Artificial Sequence
  Description of Artificial Sequence: Synthetic oligonucleotide
ctgatctcacgtcacct

SEQ ID NO: 1566 - DNA, 17 bp, Artificial Sequence
  Description of Artificial Sequence: Synthetic oligonucleotide
tgatctcacgtcacctg

SEQ ID NO: 1567 - DNA, 17 bp, Artificial Sequence
  Description of Artificial Sequence: Synthetic oligonucleotide
gatctcacgtcacctgc

SEQ ID NO: 1568 - DNA, 17 bp, Artificial Sequence
  Description of Artificial Sequence: Synthetic oligonucleotide
atctcacgtcacctgcc

SEQ ID NO: 1569 - DNA, 17 bp, Artificial Sequence
  Description of Artificial Sequence: Synthetic oligonucleotide
tctcacgtcacctgcct

SEQ ID NO: 1570 - DNA, 17 bp, Artificial Sequence
  Description of Artificial Sequence: Synthetic oligonucleotide
ctcacgtcacctgcctt

SEQ ID NO: 1571 - DNA, 17 bp, Artificial Sequence
  Description of Artificial Sequence: Synthetic oligonucleotide
tcacgtcacctgcctta

SEQ ID NO: 1572 - DNA, 17 bp, Artificial Sequence
  Description of Artificial Sequence: Synthetic oligonucleotide
cacgtcacctgccttac

SEQ ID NO: 1573 - DNA, 17 bp, Artificial Sequence
  Description of Artificial Sequence: Synthetic oligonucleotide
acgtcacctgccttaca

SEQ ID NO: 1574 - DNA, 17 bp, Artificial Sequence
  Description of Artificial Sequence: Synthetic oligonucleotide
cgtcacctgccttacag

SEQ ID NO: 1575 - DNA, 17 bp, Artificial Sequence
  Description of Artificial Sequence: Synthetic oligonucleotide
gtcacctgccttacagc

SEQ ID NO: 1576 - DNA, 17 bp, Artificial Sequence
  Description of Artificial Sequence: Synthetic oligonucleotide
tcacctgccttacagcg

SEQ ID NO: 1577 - DNA, 17 bp, Artificial Sequence
  Description of Artificial Sequence: Synthetic oligonucleotide
cacctgccttacagcgc

SEQ ID NO: 1578 - DNA, 17 bp, Artificial Sequence
  Description of Artificial Sequence: Synthetic oligonucleotide
acctgccttacagcgct

SEQ ID NO: 1579 - DNA, 17 bp, Artificial Sequence
  Description of Artificial Sequence: Synthetic oligonucleotide
cctgccttacagcgctg

SEQ ID NO: 1580 - DNA, 17 bp, Artificial Sequence
  Description of Artificial Sequence: Synthetic oligonucleotide
ctgccttacagcgctgc

SEQ ID NO: 1581 - DNA, 17 bp, Artificial Sequence
  Description of Artificial Sequence: Synthetic oligonucleotide
tgccttacagcgctgcc

SEQ ID NO: 1582 - DNA, 17 bp, Artificial Sequence
  Description of Artificial Sequence: Synthetic oligonucleotide
gccttacagcgctgcca

SEQ ID NO: 1583 - DNA, 17 bp, Artificial Sequence
  Description of Artificial Sequence: Synthetic oligonucleotide
ccttacagcgctgccac

SEQ ID NO: 1584 - DNA, 17 bp, Artificial Sequence
  Description of Artificial Sequence: Synthetic oligonucleotide
cttacagcgctgccaca

SEQ ID NO: 1585 - DNA, 17 bp, Artificial Sequence
  Description of Artificial Sequence: Synthetic oligonucleotide
ttacagcgctgccacag

SEQ ID NO: 1586 - DNA, 17 bp, Artificial Sequence
  Description of Artificial Sequence: Synthetic oligonucleotide
tacagcgctgccacagc

SEQ ID NO: 1587 - DNA, 17 bp, Artificial Sequence
  Description of Artificial Sequence: Synthetic oligonucleotide
acagcgctgccacagca

SEQ ID NO: 1588 - DNA, 17 bp, Artificial Sequence
  Description of Artificial Sequence: Synthetic oligonucleotide
cagcgctgccacagcag

SEQ ID NO: 1589 - DNA, 17 bp, Artificial Sequence
  Description of Artificial Sequence: Synthetic oligonucleotide
agcgctgccacagcagt

SEQ ID NO: 1590 - DNA, 17 bp, Artificial Sequence
  Description of Artificial Sequence: Synthetic oligonucleotide
gcgctgccacagcagtg

SEQ ID NO: 1591 - DNA, 17 bp, Artificial Sequence
  Description of Artificial Sequence: Synthetic oligonucleotide
cgctgccacagcagtgg

SEQ ID NO: 1592 - DNA, 17 bp, Artificial Sequence
  Description of Artificial Sequence: Synthetic oligonucleotide
gctgccacagcagtggg

SEQ ID NO: 1593 - DNA, 17 bp, Artificial Sequence
  Description of Artificial Sequence: Synthetic oligonucleotide
ctgccacagcagtgggc

SEQ ID NO: 1594 - DNA, 17 bp, Artificial Sequence
  Description of Artificial Sequence: Synthetic oligonucleotide
tgccacagcagtgggcc

SEQ ID NO: 1595 - DNA, 17 bp, Artificial Sequence
  Description of Artificial Sequence: Synthetic oligonucleotide
gccacagcagtgggccc

SEQ ID NO: 1596 - DNA, 17 bp, Artificial Sequence
  Description of Artificial Sequence: Synthetic oligonucleotide
ccacagcagtgggccct

SEQ ID NO: 1597 - DNA, 17 bp, Artificial Sequence
  Description of Artificial Sequence: Synthetic oligonucleotide
cacagcagtgggccctg

SEQ ID NO: 1598 - DNA, 17 bp, Artificial Sequence
  Description of Artificial Sequence: Synthetic oligonucleotide
acagcagtgggccctga

SEQ ID NO: 1599 - DNA, 17 bp, Artificial Sequence
  Description of Artificial Sequence: Synthetic oligonucleotide
cagcagtgggccctgat

SEQ ID NO: 1600 - DNA, 17 bp, Artificial Sequence
  Description of Artificial Sequence: Synthetic oligonucleotide
agcagtgggccctgatt

SEQ ID NO: 1601 - DNA, 17 bp, Artificial Sequence
  Description of Artificial Sequence: Synthetic oligonucleotide
gcagtgggccctgattc

SEQ ID NO: 1602 - DNA, 17 bp, Artificial Sequence
  Description of Artificial Sequence: Synthetic oligonucleotide
cagtgggccctgattca

SEQ ID NO: 1603 - DNA, 17 bp, Artificial Sequence
  Description of Artificial Sequence: Synthetic oligonucleotide
agtgggccctgattcag

SEQ ID NO: 1604 - DNA, 17 bp, Artificial Sequence
  Description of Artificial Sequence: Synthetic oligonucleotide
gtgggccctgattcaga

SEQ ID NO: 1605 - DNA, 17 bp, Artificial Sequence
  Description of Artificial Sequence: Synthetic oligonucleotide
tgggccctgattcagac

SEQ ID NO: 1606 - DNA, 17 bp, Artificial Sequence
  Description of Artificial Sequence: Synthetic oligonucleotide
gggccctgattcagaca

SEQ ID NO: 1607 - DNA, 17 bp, Artificial Sequence
  Description of Artificial Sequence: Synthetic oligonucleotide
ggccctgattcagacag

SEQ ID NO: 1608 - DNA, 17 bp, Artificial Sequence
  Description of Artificial Sequence: Synthetic oligonucleotide
gccctgattcagacagc

SEQ ID NO: 1609 - DNA, 17 bp, Artificial Sequence
  Description of Artificial Sequence: Synthetic oligonucleotide
ccctgattcagacagca

SEQ ID NO: 1610 - DNA, 17 bp, Artificial Sequence
  Description of Artificial Sequence: Synthetic oligonucleotide
cctgattcagacagcag

SEQ ID NO: 1611 - DNA, 17 bp, Artificial Sequence
  Description of Artificial Sequence: Synthetic oligonucleotide
ctgattcagacagcagg

SEQ ID NO: 1612 - DNA, 17 bp, Artificial Sequence
  Description of Artificial Sequence: Synthetic oligonucleotide
tggtcatcagcgactgc

SEQ ID NO: 1613 - DNA, 17 bp, Artificial Sequence
  Description of Artificial Sequence: Synthetic oligonucleotide
tgattcagacagcaggg

SEQ ID NO: 1614 - DNA, 17 bp, Artificial Sequence
  Description of Artificial Sequence: Synthetic oligonucleotide
gattcagacagcagggg

SEQ ID NO: 1615 - DNA, 17 bp, Artificial Sequence
  Description of Artificial Sequence: Synthetic oligonucleotide
attcagacagcaggggg

SEQ ID NO: 1616 - DNA, 17 bp, Artificial Sequence
  Description of Artificial Sequence: Synthetic oligonucleotide
ttcagacagcagggggt

SEQ ID NO: 1617 - DNA, 17 bp, Artificial Sequence
  Description of Artificial Sequence: Synthetic oligonucleotide
tcagacagcagggggtc

SEQ ID NO: 1618 - DNA, 17 bp, Artificial Sequence
  Description of Artificial Sequence: Synthetic oligonucleotide
cagacagcagggggtca

SEQ ID NO: 1619 - DNA, 17 bp, Artificial Sequence
  Description of Artificial Sequence: Synthetic oligonucleotide
agacagcagggggtcat

SEQ ID NO: 1620 - DNA, 17 bp, Artificial Sequence
  Description of Artificial Sequence: Synthetic oligonucleotide
gacagcagggggtcatc

SEQ ID NO: 1621 - DNA, 17 bp, Artificial Sequence
  Description of Artificial Sequence: Synthetic oligonucleotide
acagcagggggtcatcc

SEQ ID NO: 1622 - DNA, 17 bp, Artificial Sequence
  Description of Artificial Sequence: Synthetic oligonucleotide
cagcagggggtcatccc

SEQ ID NO: 1623 - DNA, 17 bp, Artificial Sequence
  Description of Artificial Sequence: Synthetic oligonucleotide
agcagggggtcatcccc

SEQ ID NO: 1624 - DNA, 17 bp, Artificial Sequence
  Description of Artificial Sequence: Synthetic oligonucleotide
gcagggggtcatcccct

SEQ ID NO: 1625 - DNA, 17 bp, Artificial Sequence
  Description of Artificial Sequence: Synthetic oligonucleotide
cagggggtcatccccta

SEQ ID NO: 1626 - DNA, 17 bp, Artificial Sequence
  Description of Artificial Sequence: Synthetic oligonucleotide
agggggtcatcccctaa

SEQ ID NO: 1627 - DNA, 17 bp, Artificial Sequence
  Description of Artificial Sequence: Synthetic oligonucleotide
gggggtcatcccctaag

SEQ ID NO: 1628 - DNA, 17 bp, Artificial Sequence
  Description of Artificial Sequence: Synthetic oligonucleotide
ggggtcatcccctaagt

SEQ ID NO: 1629 - DNA, 17 bp, Artificial Sequence
  Description of Artificial Sequence: Synthetic oligonucleotide
gggtcatcccctaagtg

SEQ ID NO: 1630 - DNA, 18 bp, Artificial Sequence
  Description of Artificial Sequence: Synthetic oligonucleotide
ggtcatcagcgactgctg

SEQ ID NO: 1631 - DNA, 18 bp, Artificial Sequence
  Description of Artificial Sequence: Synthetic oligonucleotide
gtcatcagcgactgctgg

SEQ ID NO: 1632 - DNA, 18 bp, Artificial Sequence
  Description of Artificial Sequence: Synthetic oligonucleotide
tcatcagcgactgctggc

SEQ ID NO: 1633 - DNA, 18 bp, Artificial Sequence
  Description of Artificial Sequence: Synthetic oligonucleotide
catcagcgactgctggct

SEQ ID NO: 1634 - DNA, 18 bp, Artificial Sequence
  Description of Artificial Sequence: Synthetic oligonucleotide
atcagcgactgctggctt

SEQ ID NO: 1635 - DNA, 18 bp, Artificial Sequence
  Description of Artificial Sequence: Synthetic oligonucleotide
tcagcgactgctggcttt

SEQ ID NO: 1636 - DNA, 18 bp, Artificial Sequence
  Description of Artificial Sequence: Synthetic oligonucleotide
cagcgactgctggctttg

SEQ ID NO: 1637 - DNA, 18 bp, Artificial Sequence
  Description of Artificial Sequence: Synthetic oligonucleotide
agcgactgctggctttgt

SEQ ID NO: 1638 - DNA, 18 bp, Artificial Sequence
  Description of Artificial Sequence: Synthetic oligonucleotide
gcgactgctggctttgtc

SEQ ID NO: 1639 - DNA, 18 bp, Artificial Sequence
  Description of Artificial Sequence: Synthetic oligonucleotide
cgactgctggctttgtct

SEQ ID NO: 1640 - DNA, 18 bp, Artificial Sequence
  Description of Artificial Sequence: Synthetic oligonucleotide
gactgctggctttgtctg

SEQ ID NO: 1641 - DNA, 18 bp, Artificial Sequence
  Description of Artificial Sequence: Synthetic oligonucleotide
actgctggctttgtctgg

SEQ ID NO: 1642 - DNA, 18 bp, Artificial Sequence
  Description of Artificial Sequence: Synthetic oligonucleotide
ctgctggctttgtctgga

SEQ ID NO: 1643 - DNA, 18 bp, Artificial Sequence
  Description of Artificial Sequence: Synthetic oligonucleotide
tgctggctttgtctggat

SEQ ID NO: 1644 - DNA, 18 bp, Artificial Sequence
  Description of Artificial Sequence: Synthetic oligonucleotide
gctggctttgtctggata

SEQ ID NO: 1645 - DNA, 18 bp, Artificial Sequence
  Description of Artificial Sequence: Synthetic oligonucleotide
ctggctttgtctggatag

SEQ ID NO: 1646 - DNA, 18 bp, Artificial Sequence
  Description of Artificial Sequence: Synthetic oligonucleotide
tggctttgtctggatagg

SEQ ID NO: 1647 - DNA, 18 bp, Artificial Sequence
  Description of Artificial Sequence: Synthetic oligonucleotide
ggctttgtctggataggg

SEQ ID NO: 1648 - DNA, 18 bp, Artificial Sequence
  Description of Artificial Sequence: Synthetic oligonucleotide
gctttgtctggatagggt

SEQ ID NO: 1649 - DNA, 18 bp, Artificial Sequence
  Description of Artificial Sequence: Synthetic oligonucleotide
ctttgtctggatagggtg

SEQ ID NO: 1650 - DNA, 18 bp, Artificial Sequence
  Description of Artificial Sequence: Synthetic oligonucleotide
tttgtctggatagggtgg

SEQ ID NO: 1651 - DNA, 18 bp, Artificial Sequence
  Description of Artificial Sequence: Synthetic oligonucleotide
ttgtctggatagggtggg

SEQ ID NO: 1652 - DNA, 18 bp, Artificial Sequence
  Description of Artificial Sequence: Synthetic oligonucleotide
tgtctggatagggtgggt

SEQ ID NO: 1653 - DNA, 18 bp, Artificial Sequence
  Description of Artificial Sequence: Synthetic oligonucleotide
gtctggatagggtgggtt

SEQ ID NO: 1654 - DNA, 18 bp, Artificial Sequence
  Description of Artificial Sequence: Synthetic oligonucleotide
tctggatagggtgggttt

SEQ ID NO: 1655 - DNA, 18 bp, Artificial Sequence
  Description of Artificial Sequence: Synthetic oligonucleotide
ctggatagggtgggtttc

SEQ ID NO: 1656 - DNA, 18 bp, Artificial Sequence
  Description of Artificial Sequence: Synthetic oligonucleotide
tggatagggtgggtttca

SEQ ID NO: 1657 - DNA, 18 bp, Artificial Sequence
  Description of Artificial Sequence: Synthetic oligonucleotide
ggatagggtgggtttcag

SEQ ID NO: 1658 - DNA, 18 bp, Artificial Sequence
  Description of Artificial Sequence: Synthetic oligonucleotide
gatagggtgggtttcagg

SEQ ID NO: 1659 - DNA, 18 bp, Artificial Sequence
  Description of Artificial Sequence: Synthetic oligonucleotide
atagggtgggtttcaggg

SEQ ID NO: 1660 - DNA, 18 bp, Artificial Sequence
  Description of Artificial Sequence: Synthetic oligonucleotide
tagggtgggtttcaggga

SEQ ID NO: 1661 - DNA, 18 bp, Artificial Sequence
  Description of Artificial Sequence: Synthetic oligonucleotide
agggtgggtttcagggat

SEQ ID NO: 1662 - DNA, 18 bp, Artificial Sequence
  Description of Artificial Sequence: Synthetic oligonucleotide
gggtgggtttcagggatt

SEQ ID NO: 1663 - DNA, 18 bp, Artificial Sequence
  Description of Artificial Sequence: Synthetic oligonucleotide
ggtgggtttcagggattc

SEQ ID NO: 1664 - DNA, 18 bp, Artificial Sequence
  Description of Artificial Sequence: Synthetic oligonucleotide
gtgggtttcagggattct

SEQ ID NO: 1665 - DNA, 18 bp, Artificial Sequence
  Description of Artificial Sequence: Synthetic oligonucleotide
tgggtttcagggattctg

SEQ ID NO: 1666 - DNA, 18 bp, Artificial Sequence
  Description of Artificial Sequence: Synthetic oligonucleotide
gggtttcagggattctga

SEQ ID NO: 1667 - DNA, 18 bp, Artificial Sequence
  Description of Artificial Sequence: Synthetic oligonucleotide
ggtttcagggattctgat

SEQ ID NO: 1668 - DNA, 18 bp, Artificial Sequence
  Description of Artificial Sequence: Synthetic oligonucleotide
gtttcagggattctgatc

SEQ ID NO: 1669 - DNA, 18 bp, Artificial Sequence
  Description of Artificial Sequence: Synthetic oligonucleotide
tttcagggattctgatct

SEQ ID NO: 1670 - DNA, 18 bp, Artificial Sequence
  Description of Artificial Sequence: Synthetic oligonucleotide
ttcagggattctgatctc

SEQ ID NO: 1671 - DNA, 18 bp, Artificial Sequence
  Description of Artificial Sequence: Synthetic oligonucleotide
tcagggattctgatctca

SEQ ID NO: 1672 - DNA, 18 bp, Artificial Sequence
  Description of Artificial Sequence: Synthetic oligonucleotide
cagggattctgatctcac

SEQ ID NO: 1673 - DNA, 18 bp, Artificial Sequence
  Description of Artificial Sequence: Synthetic oligonucleotide
agggattctgatctcacg

SEQ ID NO: 1674 - DNA, 18 bp, Artificial Sequence
  Description of Artificial Sequence: Synthetic oligonucleotide
gggattctgatctcacgt

SEQ ID NO: 1675 - DNA, 18 bp, Artificial Sequence
  Description of Artificial Sequence: Synthetic oligonucleotide
ggattctgatctcacgtc

SEQ ID NO: 1676 - DNA, 18 bp, Artificial Sequence
  Description of Artificial Sequence: Synthetic oligonucleotide
gattctgatctcacgtca

SEQ ID NO: 1677 - DNA, 18 bp, Artificial Sequence
  Description of Artificial Sequence: Synthetic oligonucleotide
attctgatctcacgtcac

SEQ ID NO: 1678 - DNA, 18 bp, Artificial Sequence
  Description of Artificial Sequence: Synthetic oligonucleotide
ttctgatctcacgtcacc

SEQ ID NO: 1679 - DNA, 18 bp, Artificial Sequence
  Description of Artificial Sequence: Synthetic oligonucleotide
tctgatctcacgtcacct

SEQ ID NO: 1680 - DNA, 18 bp, Artificial Sequence
  Description of Artificial Sequence: Synthetic oligonucleotide
ctgatctcacgtcacctg

SEQ ID NO: 1681 - DNA, 18 bp, Artificial Sequence
  Description of Artificial Sequence: Synthetic oligonucleotide
tgatctcacgtcacctgc

SEQ ID NO: 1682 - DNA, 18 bp, Artificial Sequence
  Description of Artificial Sequence: Synthetic oligonucleotide
gatctcacgtcacctgcc

SEQ ID NO: 1683 - DNA, 18 bp, Artificial Sequence
  Description of Artificial Sequence: Synthetic oligonucleotide
atctcacgtcacctgcct

SEQ ID NO: 1684 - DNA, 18 bp, Artificial Sequence
  Description of Artificial Sequence: Synthetic oligonucleotide
tctcacgtcacctgcctt

SEQ ID NO: 1685 - DNA, 18 bp, Artificial Sequence
  Description of Artificial Sequence: Synthetic oligonucleotide
ctcacgtcacctgcctta

SEQ ID NO: 1686 - DNA, 18 bp, Artificial Sequence
  Description of Artificial Sequence: Synthetic oligonucleotide
tcacgtcacctgccttac

SEQ ID NO: 1687 - DNA, 18 bp, Artificial Sequence
  Description of Artificial Sequence: Synthetic oligonucleotide
cacgtcacctgccttaca

SEQ ID NO: 1688 - DNA, 18 bp, Artificial Sequence
  Description of Artificial Sequence: Synthetic oligonucleotide
acgtcacctgccttacag

SEQ ID NO: 1689 - DNA, 18 bp, Artificial Sequence
  Description of Artificial Sequence: Synthetic oligonucleotide
cgtcacctgccttacagc

SEQ ID NO: 1690 - DNA, 18 bp, Artificial Sequence
  Description of Artificial Sequence: Synthetic oligonucleotide
gtcacctgccttacagcg

SEQ ID NO: 1691 - DNA, 18 bp, Artificial Sequence
  Description of Artificial Sequence: Synthetic oligonucleotide
tcacctgccttacagcgc

SEQ ID NO: 1692 - DNA, 18 bp, Artificial Sequence
  Description of Artificial Sequence: Synthetic oligonucleotide
cacctgccttacagcgct

SEQ ID NO: 1693 - DNA, 18 bp, Artificial Sequence
  Description of Artificial Sequence: Synthetic oligonucleotide
acctgccttacagcgctg

SEQ ID NO: 1694 - DNA, 18 bp, Artificial Sequence
  Description of Artificial Sequence: Synthetic oligonucleotide
cctgccttacagcgctgc

SEQ ID NO: 1695 - DNA, 18 bp, Artificial Sequence
  Description of Artificial Sequence: Synthetic oligonucleotide
ctgccttacagcgctgcc

SEQ ID NO: 1696 - DNA, 18 bp, Artificial Sequence
  Description of Artificial Sequence: Synthetic oligonucleotide
tgccttacagcgctgcca

SEQ ID NO: 1697 - DNA, 18 bp, Artificial Sequence
  Description of Artificial Sequence: Synthetic oligonucleotide
gccttacagcgctgccac

SEQ ID NO: 1698 - DNA, 18 bp, Artificial Sequence
  Description of Artificial Sequence: Synthetic oligonucleotide
ccttacagcgctgccaca

SEQ ID NO: 1699 - DNA, 18 bp, Artificial Sequence
  Description of Artificial Sequence: Synthetic oligonucleotide
cttacagcgctgccacag

SEQ ID NO: 1700 - DNA, 18 bp, Artificial Sequence
  Description of Artificial Sequence: Synthetic oligonucleotide
ttacagcgctgccacagc

SEQ ID NO: 1701 - DNA, 18 bp, Artificial Sequence
  Description of Artificial Sequence: Synthetic oligonucleotide
tacagcgctgccacagca

SEQ ID NO: 1702 - DNA, 18 bp, Artificial Sequence
  Description of Artificial Sequence: Synthetic oligonucleotide
acagcgctgccacagcag

SEQ ID NO: 1703 - DNA, 18 bp, Artificial Sequence
  Description of Artificial Sequence: Synthetic oligonucleotide
cagcgctgccacagcagt

SEQ ID NO: 1704 - DNA, 18 bp, Artificial Sequence
  Description of Artificial Sequence: Synthetic oligonucleotide
agcgctgccacagcagtg

SEQ ID NO: 1705 - DNA, 18 bp, Artificial Sequence
  Description of Artificial Sequence: Synthetic oligonucleotide
gcgctgccacagcagtgg

SEQ ID NO: 1706 - DNA, 18 bp, Artificial Sequence
  Description of Artificial Sequence: Synthetic oligonucleotide
cgctgccacagcagtggg

SEQ ID NO: 1707 - DNA, 18 bp, Artificial Sequence
  Description of Artificial Sequence: Synthetic oligonucleotide
gctgccacagcagtgggc

SEQ ID NO: 1708 - DNA, 18 bp, Artificial Sequence
  Description of Artificial Sequence: Synthetic oligonucleotide
ctgccacagcagtgggcc

SEQ ID NO: 1709 - DNA, 18 bp, Artificial Sequence
  Description of Artificial Sequence: Synthetic oligonucleotide
tgccacagcagtgggccc

SEQ ID NO: 1710 - DNA, 18 bp, Artificial Sequence
  Description of Artificial Sequence: Synthetic oligonucleotide
gccacagcagtgggccct

SEQ ID NO: 1711 - DNA, 18 bp, Artificial Sequence
  Description of Artificial Sequence: Synthetic oligonucleotide
ccacagcagtgggccctg

SEQ ID NO: 1712 - DNA, 18 bp, Artificial Sequence
  Description of Artificial Sequence: Synthetic oligonucleotide
cacagcagtgggccctga

SEQ ID NO: 1713 - DNA, 18 bp, Artificial Sequence
  Description of Artificial Sequence: Synthetic oligonucleotide
acagcagtgggccctgat

SEQ ID NO: 1714 - DNA, 18 bp, Artificial Sequence
  Description of Artificial Sequence: Synthetic oligonucleotide
cagcagtgggccctgatt

SEQ ID NO: 1715 - DNA, 18 bp, Artificial Sequence
  Description of Artificial Sequence: Synthetic oligonucleotide
agcagtgggccctgattc

SEQ ID NO: 1716 - DNA, 18 bp, Artificial Sequence
  Description of Artificial Sequence: Synthetic oligonucleotide
gcagtgggccctgattca

SEQ ID NO: 1717 - DNA, 18 bp, Artificial Sequence
  Description of Artificial Sequence: Synthetic oligonucleotide
cagtgggccctgattcag

SEQ ID NO: 1718 - DNA, 18 bp, Artificial Sequence
  Description of Artificial Sequence: Synthetic oligonucleotide
agtgggccctgattcaga

SEQ ID NO: 1719 - DNA, 18 bp, Artificial Sequence
  Description of Artificial Sequence: Synthetic oligonucleotide
gtgggccctgattcagac

SEQ ID NO: 1720 - DNA, 18 bp, Artificial Sequence
  Description of Artificial Sequence: Synthetic oligonucleotide
tgggccctgattcagaca

SEQ ID NO: 1721 - DNA, 18 bp, Artificial Sequence
  Description of Artificial Sequence: Synthetic oligonucleotide
gggccctgattcagacag

SEQ ID NO: 1722 - DNA, 18 bp, Artificial Sequence
  Description of Artificial Sequence: Synthetic oligonucleotide
ggccctgattcagacagc

SEQ ID NO: 1723 - DNA, 18 bp, Artificial Sequence
  Description of Artificial Sequence: Synthetic oligonucleotide
gccctgattcagacagca

SEQ ID NO: 1724 - DNA, 18 bp, Artificial Sequence
  Description of Artificial Sequence: Synthetic oligonucleotide
ccctgattcagacagcag

SEQ ID NO: 1725 - DNA, 18 bp, Artificial Sequence
  Description of Artificial Sequence: Synthetic oligonucleotide
cctgattcagacagcagg

SEQ ID NO: 1726 - DNA, 18 bp, Artificial Sequence
  Description of Artificial Sequence: Synthetic oligonucleotide
tggtcatcagcgactgct

SEQ ID NO: 1727 - DNA, 18 bp, Artificial Sequence
  Description of Artificial Sequence: Synthetic oligonucleotide
ctgattcagacagcaggg

SEQ ID NO: 1728 - DNA, 18 bp, Artificial Sequence
  Description of Artificial Sequence: Synthetic oligonucleotide
tgattcagacagcagggg

SEQ ID NO: 1729 - DNA, 18 bp, Artificial Sequence
  Description of Artificial Sequence: Synthetic oligonucleotide
gattcagacagcaggggg

SEQ ID NO: 1730 - DNA, 18 bp, Artificial Sequence
  Description of Artificial Sequence: Synthetic oligonucleotide
attcagacagcagggggt

SEQ ID NO: 1731 - DNA, 18 bp, Artificial Sequence
  Description of Artificial Sequence: Synthetic oligonucleotide
ttcagacagcagggggtc

SEQ ID NO: 1732 - DNA, 18 bp, Artificial Sequence
  Description of Artificial Sequence: Synthetic oligonucleotide
tcagacagcagggggtca

SEQ ID NO: 1733 - DNA, 18 bp, Artificial Sequence
  Description of Artificial Sequence: Synthetic oligonucleotide
cagacagcagggggtcat

SEQ ID NO: 1734 - DNA, 18 bp, Artificial Sequence
  Description of Artificial Sequence: Synthetic oligonucleotide
agacagcagggggtcatc

SEQ ID NO: 1735 - DNA, 18 bp, Artificial Sequence
  Description of Artificial Sequence: Synthetic oligonucleotide
gacagcagggggtcatcc

SEQ ID NO: 1736 - DNA, 18 bp, Artificial Sequence
  Description of Artificial Sequence: Synthetic oligonucleotide
acagcagggggtcatccc

SEQ ID NO: 1737 - DNA, 18 bp, Artificial Sequence
  Description of Artificial Sequence: Synthetic oligonucleotide
cagcagggggtcatcccc

SEQ ID NO: 1738 - DNA, 18 bp, Artificial Sequence
  Description of Artificial Sequence: Synthetic oligonucleotide
agcagggggtcatcccct

SEQ ID NO: 1739 - DNA, 18 bp, Artificial Sequence
  Description of Artificial Sequence: Synthetic oligonucleotide
gcagggggtcatccccta

SEQ ID NO: 1740 - DNA, 18 bp, Artificial Sequence
  Description of Artificial Sequence: Synthetic oligonucleotide
cagggggtcatcccctaa

SEQ ID NO: 1741 - DNA, 18 bp, Artificial Sequence
  Description of Artificial Sequence: Synthetic oligonucleotide
agggggtcatcccctaag

SEQ ID NO: 1742 - DNA, 18 bp, Artificial Sequence
  Description of Artificial Sequence: Synthetic oligonucleotide
gggggtcatcccctaagt

SEQ ID NO: 1743 - DNA, 18 bp, Artificial Sequence
  Description of Artificial Sequence: Synthetic oligonucleotide
ggggtcatcccctaagtg

SEQ ID NO: 1744 - DNA, 19 bp, Artificial Sequence
  Description of Artificial Sequence: Synthetic oligonucleotide
ggtcatcagcgactgctgg

SEQ ID NO: 1745 - DNA, 19 bp, Artificial Sequence
  Description of Artificial Sequence: Synthetic oligonucleotide
gtcatcagcgactgctggc

SEQ ID NO: 1746 - DNA, 19 bp, Artificial Sequence
  Description of Artificial Sequence: Synthetic oligonucleotide
tcatcagcgactgctggct

SEQ ID NO: 1747 - DNA, 19 bp, Artificial Sequence
  Description of Artificial Sequence: Synthetic oligonucleotide
catcagcgactgctggctt

SEQ ID NO: 1748 - DNA, 19 bp, Artificial Sequence
  Description of Artificial Sequence: Synthetic oligonucleotide
atcagcgactgctggcttt

SEQ ID NO: 1749 - DNA, 19 bp, Artificial Sequence
  Description of Artificial Sequence: Synthetic oligonucleotide
tcagcgactgctggctttg

SEQ ID NO: 1750 - DNA, 19 bp, Artificial Sequence
  Description of Artificial Sequence: Synthetic oligonucleotide
cagcgactgctggctttgt

SEQ ID NO: 1751 - DNA, 19 bp, Artificial Sequence
  Description of Artificial Sequence: Synthetic oligonucleotide
agcgactgctggctttgtc

SEQ ID NO: 1752 - DNA, 19 bp, Artificial Sequence
  Description of Artificial Sequence: Synthetic oligonucleotide
gcgactgctggctttgtct

SEQ ID NO: 1753 - DNA, 19 bp, Artificial Sequence
  Description of Artificial Sequence: Synthetic oligonucleotide
cgactgctggctttgtctg

SEQ ID NO: 1754 - DNA, 19 bp, Artificial Sequence
  Description of Artificial Sequence: Synthetic oligonucleotide
gactgctggctttgtctgg

SEQ ID NO: 1755 - DNA, 19 bp, Artificial Sequence
  Description of Artificial Sequence: Synthetic oligonucleotide
actgctggctttgtctgga

SEQ ID NO: 1756 - DNA, 19 bp, Artificial Sequence
  Description of Artificial Sequence: Synthetic oligonucleotide
ctgctggctttgtctggat

SEQ ID NO: 1757 - DNA, 19 bp, Artificial Sequence
  Description of Artificial Sequence: Synthetic oligonucleotide
tgctggctttgtctggata

SEQ ID NO: 1758 - DNA, 19 bp, Artificial Sequence
  Description of Artificial Sequence: Synthetic oligonucleotide
gctggctttgtctggatag

SEQ ID NO: 1759 - DNA, 19 bp, Artificial Sequence
  Description of Artificial Sequence: Synthetic oligonucleotide
ctggctttgtctggatagg

SEQ ID NO: 1760 - DNA, 19 bp, Artificial Sequence
  Description of Artificial Sequence: Synthetic oligonucleotide
tggctttgtctggataggg

SEQ ID NO: 1761 - DNA, 19 bp, Artificial Sequence
  Description of Artificial Sequence: Synthetic oligonucleotide
ggctttgtctggatagggt

SEQ ID NO: 1762 - DNA, 19 bp, Artificial Sequence
  Description of Artificial Sequence: Synthetic oligonucleotide
gctttgtctggatagggtg

SEQ ID NO: 1763 - DNA, 19 bp, Artificial Sequence
  Description of Artificial Sequence: Synthetic oligonucleotide
ctttgtctggatagggtgg

SEQ ID NO: 1764 - DNA, 19 bp, Artificial Sequence
  Description of Artificial Sequence: Synthetic oligonucleotide
tttgtctggatagggtggg

SEQ ID NO: 1765 - DNA, 19 bp, Artificial Sequence
  Description of Artificial Sequence: Synthetic oligonucleotide
ttgtctggatagggtgggt

SEQ ID NO: 1766 - DNA, 19 bp, Artificial Sequence
  Description of Artificial Sequence: Synthetic oligonucleotide
tgtctggatagggtgggtt

SEQ ID NO: 1767 - DNA, 19 bp, Artificial Sequence
  Description of Artificial Sequence: Synthetic oligonucleotide
gtctggatagggtgggttt

SEQ ID NO: 1768 - DNA, 19 bp, Artificial Sequence
  Description of Artificial Sequence: Synthetic oligonucleotide
tctggatagggtgggtttc

SEQ ID NO: 1769 - DNA, 19 bp, Artificial Sequence
  Description of Artificial Sequence: Synthetic oligonucleotide
ctggatagggtgggtttca

SEQ ID NO: 1770 - DNA, 19 bp, Artificial Sequence
  Description of Artificial Sequence: Synthetic oligonucleotide
tggatagggtgggtttcag

SEQ ID NO: 1771 - DNA, 19 bp, Artificial Sequence
  Description of Artificial Sequence: Synthetic oligonucleotide
ggatagggtgggtttcagg

SEQ ID NO: 1772 - DNA, 19 bp, Artificial Sequence
  Description of Artificial Sequence: Synthetic oligonucleotide
gatagggtgggtttcaggg

SEQ ID NO: 1773 - DNA, 19 bp, Artificial Sequence
  Description of Artificial Sequence: Synthetic oligonucleotide
atagggtgggtttcaggga

SEQ ID NO: 1774 - DNA, 19 bp, Artificial Sequence
  Description of Artificial Sequence: Synthetic oligonucleotide
tagggtgggtttcagggat

SEQ ID NO: 1775 - DNA, 19 bp, Artificial Sequence
  Description of Artificial Sequence: Synthetic oligonucleotide
agggtgggtttcagggatt

SEQ ID NO: 1776 - DNA, 19 bp, Artificial Sequence
  Description of Artificial Sequence: Synthetic oligonucleotide
gggtgggtttcagggattc

SEQ ID NO: 1777 - DNA, 19 bp, Artificial Sequence
  Description of Artificial Sequence: Synthetic oligonucleotide
ggtgggtttcagggattct

SEQ ID NO: 1778 - DNA, 19 bp, Artificial Sequence
  Description of Artificial Sequence: Synthetic oligonucleotide
gtgggtttcagggattctg

SEQ ID NO: 1779 - DNA, 19 bp, Artificial Sequence
  Description of Artificial Sequence: Synthetic oligonucleotide
tgggtttcagggattctga

SEQ ID NO: 1780 - DNA, 19 bp, Artificial Sequence
  Description of Artificial Sequence: Synthetic oligonucleotide
gggtttcagggattctgat

SEQ ID NO: 1781 - DNA, 19 bp, Artificial Sequence
  Description of Artificial Sequence: Synthetic oligonucleotide
ggtttcagggattctgatc

SEQ ID NO: 1782 - DNA, 19 bp, Artificial Sequence
  Description of Artificial Sequence: Synthetic oligonucleotide
gtttcagggattctgatct

SEQ ID NO: 1783 - DNA, 19 bp, Artificial Sequence
  Description of Artificial Sequence: Synthetic oligonucleotide
tttcagggattctgatctc

SEQ ID NO: 1784 - DNA, 19 bp, Artificial Sequence
  Description of Artificial Sequence: Synthetic oligonucleotide
ttcagggattctgatctca

SEQ ID NO: 1785 - DNA, 19 bp, Artificial Sequence
  Description of Artificial Sequence: Synthetic oligonucleotide
tcagggattctgatctcac

SEQ ID NO: 1786 - DNA, 19 bp, Artificial Sequence
  Description of Artificial Sequence: Synthetic oligonucleotide
cagggattctgatctcacg

SEQ ID NO: 1787 - DNA, 19 bp, Artificial Sequence
  Description of Artificial Sequence: Synthetic oligonucleotide
agggattctgatctcacgt

SEQ ID NO: 1788 - DNA, 19 bp, Artificial Sequence
  Description of Artificial Sequence: Synthetic oligonucleotide
gggattctgatctcacgtc

SEQ ID NO: 1789 - DNA, 19 bp, Artificial Sequence
  Description of Artificial Sequence: Synthetic oligonucleotide
ggattctgatctcacgtca

SEQ ID NO: 1790 - DNA, 19 bp, Artificial Sequence
  Description of Artificial Sequence: Synthetic oligonucleotide
gattctgatctcacgtcac

SEQ ID NO: 1791 - DNA, 19 bp, Artificial Sequence
  Description of Artificial Sequence: Synthetic oligonucleotide
attctgatctcacgtcacc

SEQ ID NO: 1792 - DNA, 19 bp, Artificial Sequence
  Description of Artificial Sequence: Synthetic oligonucleotide
ttctgatctcacgtcacct

SEQ ID NO: 1793 - DNA, 19 bp, Artificial Sequence
  Description of Artificial Sequence: Synthetic oligonucleotide
tctgatctcacgtcacctg

SEQ ID NO: 1794 - DNA, 19 bp, Artificial Sequence
  Description of Artificial Sequence: Synthetic oligonucleotide
ctgatctcacgtcacctgc

SEQ ID NO: 1795 - DNA, 19 bp, Artificial Sequence
  Description of Artificial Sequence: Synthetic oligonucleotide
tgatctcacgtcacctgcc

SEQ ID NO: 1796 - DNA, 19 bp, Artificial Sequence
  Description of Artificial Sequence: Synthetic oligonucleotide
gatctcacgtcacctgcct

SEQ ID NO: 1797 - DNA, 19 bp, Artificial Sequence
  Description of Artificial Sequence: Synthetic oligonucleotide
atctcacgtcacctgcctt

SEQ ID NO: 1798 - DNA, 19 bp, Artificial Sequence
  Description of Artificial Sequence: Synthetic oligonucleotide
tctcacgtcacctgcctta

SEQ ID NO: 1799 - DNA, 19 bp, Artificial Sequence
  Description of Artificial Sequence: Synthetic oligonucleotide
ctcacgtcacctgccttac

SEQ ID NO: 1800 - DNA, 19 bp, Artificial Sequence
  Description of Artificial Sequence: Synthetic oligonucleotide
tcacgtcacctgccttaca

SEQ ID NO: 1801 - DNA, 19 bp, Artificial Sequence
  Description of Artificial Sequence: Synthetic oligonucleotide
cacgtcacctgccttacag

SEQ ID NO: 1802 - DNA, 19 bp, Artificial Sequence
  Description of Artificial Sequence: Synthetic oligonucleotide
acgtcacctgccttacagc

SEQ ID NO: 1803 - DNA, 19 bp, Artificial Sequence
  Description of Artificial Sequence: Synthetic oligonucleotide
cgtcacctgccttacagcg

SEQ ID NO: 1804 - DNA, 19 bp, Artificial Sequence
  Description of Artificial Sequence: Synthetic oligonucleotide
gtcacctgccttacagcgc

SEQ ID NO: 1805 - DNA, 19 bp, Artificial Sequence
  Description of Artificial Sequence: Synthetic oligonucleotide
tcacctgccttacagcgct

SEQ ID NO: 1806 - DNA, 19 bp, Artificial Sequence
  Description of Artificial Sequence: Synthetic oligonucleotide
cacctgccttacagcgctg

SEQ ID NO: 1807 - DNA, 19 bp, Artificial Sequence
  Description of Artificial Sequence: Synthetic oligonucleotide
acctgccttacagcgctgc

SEQ ID NO: 1808 - DNA, 19 bp, Artificial Sequence
  Description of Artificial Sequence: Synthetic oligonucleotide
cctgccttacagcgctgcc

SEQ ID NO: 1809 - DNA, 19 bp, Artificial Sequence
  Description of Artificial Sequence: Synthetic oligonucleotide
ctgccttacagcgctgcca

SEQ ID NO: 1810 - DNA, 19 bp, Artificial Sequence
  Description of Artificial Sequence: Synthetic oligonucleotide
tgccttacagcgctgccac

SEQ ID NO: 1811 - DNA, 19 bp, Artificial Sequence
  Description of Artificial Sequence: Synthetic oligonucleotide
gccttacagcgctgccaca

SEQ ID NO: 1812 - DNA, 19 bp, Artificial Sequence
  Description of Artificial Sequence: Synthetic oligonucleotide
ccttacagcgctgccacag

SEQ ID NO: 1813 - DNA, 19 bp, Artificial Sequence
  Description of Artificial Sequence: Synthetic oligonucleotide
cttacagcgctgccacagc

SEQ ID NO: 1814 - DNA, 19 bp, Artificial Sequence
  Description of Artificial Sequence: Synthetic oligonucleotide
ttacagcgctgccacagca

SEQ ID NO: 1815 - DNA, 19 bp, Artificial Sequence
  Description of Artificial Sequence: Synthetic oligonucleotide
tacagcgctgccacagcag

SEQ ID NO: 1816 - DNA, 19 bp, Artificial Sequence
  Description of Artificial Sequence: Synthetic oligonucleotide
acagcgctgccacagcagt

SEQ ID NO: 1817 - DNA, 19 bp, Artificial Sequence
  Description of Artificial Sequence: Synthetic oligonucleotide
cagcgctgccacagcagtg

SEQ ID NO: 1818 - DNA, 19 bp, Artificial Sequence
  Description of Artificial Sequence: Synthetic oligonucleotide
agcgctgccacagcagtgg

SEQ ID NO: 1819 - DNA, 19 bp, Artificial Sequence
  Description of Artificial Sequence: Synthetic oligonucleotide
gcgctgccacagcagtggg

SEQ ID NO: 1820 - DNA, 19 bp, Artificial Sequence
  Description of Artificial Sequence: Synthetic oligonucleotide
cgctgccacagcagtgggc

SEQ ID NO: 1821 - DNA, 19 bp, Artificial Sequence
  Description of Artificial Sequence: Synthetic oligonucleotide
gctgccacagcagtgggcc

SEQ ID NO: 1822 - DNA, 19 bp, Artificial Sequence
  Description of Artificial Sequence: Synthetic oligonucleotide
ctgccacagcagtgggccc

SEQ ID NO: 1823 - DNA, 19 bp, Artificial Sequence
  Description of Artificial Sequence: Synthetic oligonucleotide
tgccacagcagtgggccct

SEQ ID NO: 1824 - DNA, 19 bp, Artificial Sequence
  Description of Artificial Sequence: Synthetic oligonucleotide
gccacagcagtgggccctg

SEQ ID NO: 1825 - DNA, 19 bp, Artificial Sequence
  Description of Artificial Sequence: Synthetic oligonucleotide
ccacagcagtgggccctga

SEQ ID NO: 1826 - DNA, 19 bp, Artificial Sequence
  Description of Artificial Sequence: Synthetic oligonucleotide
cacagcagtgggccctgat

SEQ ID NO: 1827 - DNA, 19 bp, Artificial Sequence
  Description of Artificial Sequence: Synthetic oligonucleotide
acagcagtgggccctgatt

SEQ ID NO: 1828 - DNA, 19 bp, Artificial Sequence
  Description of Artificial Sequence: Synthetic oligonucleotide
cagcagtgggccctgattc

SEQ ID NO: 1829 - DNA, 19 bp, Artificial Sequence
  Description of Artificial Sequence: Synthetic oligonucleotide
agcagtgggccctgattca

SEQ ID NO: 1830 - DNA, 19 bp, Artificial Sequence
  Description of Artificial Sequence: Synthetic oligonucleotide
gcagtgggccctgattcag

SEQ ID NO: 1831 - DNA, 19 bp, Artificial Sequence
  Description of Artificial Sequence: Synthetic oligonucleotide
cagtgggccctgattcaga

SEQ ID NO: 1832 - DNA, 19 bp, Artificial Sequence
  Description of Artificial Sequence: Synthetic oligonucleotide
agtgggccctgattcagac

SEQ ID NO: 1833 - DNA, 19 bp, Artificial Sequence
  Description of Artificial Sequence: Synthetic oligonucleotide
gtgggccctgattcagaca

SEQ ID NO: 1834 - DNA, 19 bp, Artificial Sequence
  Description of Artificial Sequence: Synthetic oligonucleotide
tgggccctgattcagacag

SEQ ID NO: 1835 - DNA, 19 bp, Artificial Sequence
  Description of Artificial Sequence: Synthetic oligonucleotide
gggccctgattcagacagc

SEQ ID NO: 1836 - DNA, 19 bp, Artificial Sequence
  Description of Artificial Sequence: Synthetic oligonucleotide
ggccctgattcagacagca

SEQ ID NO: 1837 - DNA, 19 bp, Artificial Sequence
  Description of Artificial Sequence: Synthetic oligonucleotide
gccctgattcagacagcag

SEQ ID NO: 1838 - DNA, 19 bp, Artificial Sequence
  Description of Artificial Sequence: Synthetic oligonucleotide
ccctgattcagacagcagg

SEQ ID NO: 1839 - DNA, 19 bp, Artificial Sequence
  Description of Artificial Sequence: Synthetic oligonucleotide
tggtcatcagcgactgctg

SEQ ID NO: 1840 - DNA, 19 bp, Artificial Sequence
  Description of Artificial Sequence: Synthetic oligonucleotide
cctgattcagacagcaggg

SEQ ID NO: 1841 - DNA, 19 bp, Artificial Sequence
  Description of Artificial Sequence: Synthetic oligonucleotide
ctgattcagacagcagggg

SEQ ID NO: 1842 - DNA, 19 bp, Artificial Sequence
  Description of Artificial Sequence: Synthetic oligonucleotide
tgattcagacagcaggggg

SEQ ID NO: 1843 - DNA, 19 bp, Artificial Sequence
  Description of Artificial Sequence: Synthetic oligonucleotide
gattcagacagcagggggt

SEQ ID NO: 1844 - DNA, 19 bp, Artificial Sequence
  Description of Artificial Sequence: Synthetic oligonucleotide
attcagacagcagggggtc

SEQ ID NO: 1845 - DNA, 19 bp, Artificial Sequence
  Description of Artificial Sequence: Synthetic oligonucleotide
ttcagacagcagggggtca

SEQ ID NO: 1846 - DNA, 19 bp, Artificial Sequence
  Description of Artificial Sequence: Synthetic oligonucleotide
tcagacagcagggggtcat

SEQ ID NO: 1847 - DNA, 19 bp, Artificial Sequence
  Description of Artificial Sequence: Synthetic oligonucleotide
cagacagcagggggtcatc

SEQ ID NO: 1848 - DNA, 19 bp, Artificial Sequence
  Description of Artificial Sequence: Synthetic oligonucleotide
agacagcagggggtcatcc

SEQ ID NO: 1849 - DNA, 19 bp, Artificial Sequence
  Description of Artificial Sequence: Synthetic oligonucleotide
gacagcagggggtcatccc

SEQ ID NO: 1850 - DNA, 19 bp, Artificial Sequence
  Description of Artificial Sequence: Synthetic oligonucleotide
acagcagggggtcatcccc

SEQ ID NO: 1851 - DNA, 19 bp, Artificial Sequence
  Description of Artificial Sequence: Synthetic oligonucleotide
cagcagggggtcatcccct

SEQ ID NO: 1852 - DNA, 19 bp, Artificial Sequence
  Description of Artificial Sequence: Synthetic oligonucleotide
agcagggggtcatccccta

SEQ ID NO: 1853 - DNA, 19 bp, Artificial Sequence
  Description of Artificial Sequence: Synthetic oligonucleotide
gcagggggtcatcccctaa

SEQ ID NO: 1854 - DNA, 19 bp, Artificial Sequence
  Description of Artificial Sequence: Synthetic oligonucleotide
cagggggtcatcccctaag

SEQ ID NO: 1855 - DNA, 19 bp, Artificial Sequence
  Description of Artificial Sequence: Synthetic oligonucleotide
agggggtcatcccctaagt

SEQ ID NO: 1856 - DNA, 19 bp, Artificial Sequence
  Description of Artificial Sequence: Synthetic oligonucleotide
gggggtcatcccctaagtg

SEQ ID NO: 1857 - DNA, 20 bp, Artificial Sequence
  Description of Artificial Sequence: Synthetic oligonucleotide
ggtcatcagcgactgctggc

SEQ ID NO: 1858 - DNA, 20 bp, Artificial Sequence
  Description of Artificial Sequence: Synthetic oligonucleotide
gtcatcagcgactgctggct

SEQ ID NO: 1859 - DNA, 20 bp, Artificial Sequence
  Description of Artificial Sequence: Synthetic oligonucleotide
tcatcagcgactgctggctt

SEQ ID NO: 1860 - DNA, 20 bp, Artificial Sequence
  Description of Artificial Sequence: Synthetic oligonucleotide
catcagcgactgctggcttt

SEQ ID NO: 1861 - DNA, 20 bp, Artificial Sequence
  Description of Artificial Sequence: Synthetic oligonucleotide
atcagcgactgctggctttg

SEQ ID NO: 1862 - DNA, 20 bp, Artificial Sequence
  Description of Artificial Sequence: Synthetic oligonucleotide
tcagcgactgctggctttgt

SEQ ID NO: 1863 - DNA, 20 bp, Artificial Sequence
  Description of Artificial Sequence: Synthetic oligonucleotide
cagcgactgctggctttgtc

SEQ ID NO: 1864 - DNA, 20 bp, Artificial Sequence
  Description of Artificial Sequence: Synthetic oligonucleotide
agcgactgctggctttgtct

SEQ ID NO: 1865 - DNA, 20 bp, Artificial Sequence
  Description of Artificial Sequence: Synthetic oligonucleotide
gcgactgctggctttgtctg

SEQ ID NO: 1866 - DNA, 20 bp, Artificial Sequence
  Description of Artificial Sequence: Synthetic oligonucleotide
cgactgctggctttgtctgg

SEQ ID NO: 1867 - DNA, 20 bp, Artificial Sequence
  Description of Artificial Sequence: Synthetic oligonucleotide
gactgctggctttgtctgga

SEQ ID NO: 1868 - DNA, 20 bp, Artificial Sequence
  Description of Artificial Sequence: Synthetic oligonucleotide
actgctggctttgtctggat

SEQ ID NO: 1869 - DNA, 20 bp, Artificial Sequence
  Description of Artificial Sequence: Synthetic oligonucleotide
ctgctggctttgtctggata

SEQ ID NO: 1870 - DNA, 20 bp, Artificial Sequence
  Description of Artificial Sequence: Synthetic oligonucleotide
tgctggctttgtctggatag

SEQ ID NO: 1871 - DNA, 20 bp, Artificial Sequence
  Description of Artificial Sequence: Synthetic oligonucleotide
ctggctttgtctggataggg

SEQ ID NO: 1872 - DNA, 20 bp, Artificial Sequence
  Description of Artificial Sequence: Synthetic oligonucleotide
tggctttgtctggatagggt

SEQ ID NO: 1873 - DNA, 20 bp, Artificial Sequence
  Description of Artificial Sequence: Synthetic oligonucleotide
ggctttgtctggatagggtg

SEQ ID NO: 1874 - DNA, 20 bp, Artificial Sequence
  Description of Artificial Sequence: Synthetic oligonucleotide
gctttgtctggatagggtgg

SEQ ID NO: 1875 - DNA, 20 bp, Artificial Sequence
  Description of Artificial Sequence: Synthetic oligonucleotide
ctttgtctggatagggtggg

SEQ ID NO: 1876 - DNA, 20 bp, Artificial Sequence
  Description of Artificial Sequence: Synthetic oligonucleotide
tttgtctggatagggtgggt

SEQ ID NO: 1877 - DNA, 20 bp, Artificial Sequence
  Description of Artificial Sequence: Synthetic oligonucleotide
ttgtctggatagggtgggtt

SEQ ID NO: 1878 - DNA, 20 bp, Artificial Sequence
  Description of Artificial Sequence: Synthetic oligonucleotide
tgtctggatagggtgggttt

SEQ ID NO: 1879 - DNA, 20 bp, Artificial Sequence
  Description of Artificial Sequence: Synthetic oligonucleotide
gtctggatagggtgggtttc

SEQ ID NO: 1880 - DNA, 20 bp, Artificial Sequence
  Description of Artificial Sequence: Synthetic oligonucleotide
tctggatagggtgggtttca

SEQ ID NO: 1881 - DNA, 20 bp, Artificial Sequence
  Description of Artificial Sequence: Synthetic oligonucleotide
ctggatagggtgggtttcag

SEQ ID NO: 1882 - DNA, 20 bp, Artificial Sequence
  Description of Artificial Sequence: Synthetic oligonucleotide
tggatagggtgggtttcagg

SEQ ID NO: 1883 - DNA, 20 bp, Artificial Sequence
  Description of Artificial Sequence: Synthetic oligonucleotide
ggatagggtgggtttcaggg

SEQ ID NO: 1884 - DNA, 20 bp, Artificial Sequence
  Description of Artificial Sequence: Synthetic oligonucleotide
gatagggtgggtttcaggga

SEQ ID NO: 1885 - DNA, 20 bp, Artificial Sequence
  Description of Artificial Sequence: Synthetic oligonucleotide
atagggtgggtttcagggat

SEQ ID NO: 1886 - DNA, 20 bp, Artificial Sequence
  Description of Artificial Sequence: Synthetic oligonucleotide
tagggtgggtttcagggatt

SEQ ID NO: 1887 - DNA, 20 bp, Artificial Sequence
  Description of Artificial Sequence: Synthetic oligonucleotide
agggtgggtttcagggattc

SEQ ID NO: 1888 - DNA, 20 bp, Artificial Sequence
  Description of Artificial Sequence: Synthetic oligonucleotide
gggtgggtttcagggattct

SEQ ID NO: 1889 - DNA, 20 bp, Artificial Sequence
  Description of Artificial Sequence: Synthetic oligonucleotide
ggtgggtttcagggattctg

SEQ ID NO: 1890 - DNA, 20 bp, Artificial Sequence
  Description of Artificial Sequence: Synthetic oligonucleotide
tgggtttcagggattctgat

SEQ ID NO: 1891 - DNA, 20 bp, Artificial Sequence
  Description of Artificial Sequence: Synthetic oligonucleotide
gggtttcagggattctgatc

SEQ ID NO: 1892 - DNA, 20 bp, Artificial Sequence
  Description of Artificial Sequence: Synthetic oligonucleotide
ggtttcagggattctgatct

SEQ ID NO: 1893 - DNA, 20 bp, Artificial Sequence
  Description of Artificial Sequence: Synthetic oligonucleotide
gtttcagggattctgatctc

SEQ ID NO: 1894 - DNA, 20 bp, Artificial Sequence
  Description of Artificial Sequence: Synthetic oligonucleotide
tttcagggattctgatctca

SEQ ID NO: 1895 - DNA, 20 bp, Artificial Sequence
  Description of Artificial Sequence: Synthetic oligonucleotide
ttcagggattctgatctcac

SEQ ID NO: 1896 - DNA, 20 bp, Artificial Sequence
  Description of Artificial Sequence: Synthetic oligonucleotide
tcagggattctgatctcacg

SEQ ID NO: 1897 - DNA, 20 bp, Artificial Sequence
  Description of Artificial Sequence: Synthetic oligonucleotide
cagggattctgatctcacgt

SEQ ID NO: 1898 - DNA, 20 bp, Artificial Sequence
  Description of Artificial Sequence: Synthetic oligonucleotide
agggattctgatctcacgtc

SEQ ID NO: 1899 - DNA, 20 bp, Artificial Sequence
  Description of Artificial Sequence: Synthetic oligonucleotide
gggattctgatctcacgtca

SEQ ID NO: 1900 - DNA, 20 bp, Artificial Sequence
  Description of Artificial Sequence: Synthetic oligonucleotide
ggattctgatctcacgtcac

SEQ ID NO: 1901 - DNA, 20 bp, Artificial Sequence
  Description of Artificial Sequence: Synthetic oligonucleotide
gattctgatctcacgtcacc

SEQ ID NO: 1902 - DNA, 20 bp, Artificial Sequence
  Description of Artificial Sequence: Synthetic oligonucleotide
attctgatctcacgtcacct

SEQ ID NO: 1903 - DNA, 20 bp, Artificial Sequence
  Description of Artificial Sequence: Synthetic oligonucleotide
ttctgatctcacgtcacctg

SEQ ID NO: 1904 - DNA, 20 bp, Artificial Sequence
  Description of Artificial Sequence: Synthetic oligonucleotide
tctgatctcacgtcacctgc

SEQ ID NO: 1905 - DNA, 20 bp, Artificial Sequence
  Description of Artificial Sequence: Synthetic oligonucleotide
ctgatctcacgtcacctgcc

SEQ ID NO: 1906 - DNA, 20 bp, Artificial Sequence
  Description of Artificial Sequence: Synthetic oligonucleotide
tgatctcacgtcacctgcct

SEQ ID NO: 1907 - DNA, 20 bp, Artificial Sequence
  Description of Artificial Sequence: Synthetic oligonucleotide
gatctcacgtcacctgcctt

SEQ ID NO: 1908 - DNA, 20 bp, Artificial Sequence
  Description of Artificial Sequence: Synthetic oligonucleotide
atctcacgtcacctgcctta

SEQ ID NO: 1909 - DNA, 20 bp, Artificial Sequence
  Description of Artificial Sequence: Synthetic oligonucleotide
ctcacgtcacctgccttaca

SEQ ID NO: 1910 - DNA, 20 bp, Artificial Sequence
  Description of Artificial Sequence: Synthetic oligonucleotide
tcacgtcacctgccttacag

SEQ ID NO: 1911 - DNA, 20 bp, Artificial Sequence
  Description of Artificial Sequence: Synthetic oligonucleotide
cacgtcacctgccttacagc

SEQ ID NO: 1912 - DNA, 20 bp, Artificial Sequence
  Description of Artificial Sequence: Synthetic oligonucleotide
acgtcacctgccttacagcg

SEQ ID NO: 1913 - DNA, 20 bp, Artificial Sequence
  Description of Artificial Sequence: Synthetic oligonucleotide
cgtcacctgccttacagcgc

SEQ ID NO: 1914 - DNA, 20 bp, Artificial Sequence
  Description of Artificial Sequence: Synthetic oligonucleotide
gtcacctgccttacagcgct

SEQ ID NO: 1915 - DNA, 20 bp, Artificial Sequence
  Description of Artificial Sequence: Synthetic oligonucleotide
tcacctgccttacagcgctg

SEQ ID NO: 1916 - DNA, 20 bp, Artificial Sequence
  Description of Artificial Sequence: Synthetic oligonucleotide
cacctgccttacagcgctgc

SEQ ID NO: 1917 - DNA, 20 bp, Artificial Sequence
  Description of Artificial Sequence: Synthetic oligonucleotide
acctgccttacagcgctgcc

SEQ ID NO: 1918 - DNA, 20 bp, Artificial Sequence
  Description of Artificial Sequence: Synthetic oligonucleotide
cctgccttacagcgctgcca

SEQ ID NO: 1919 - DNA, 20 bp, Artificial Sequence
  Description of Artificial Sequence: Synthetic oligonucleotide
ctgccttacagcgctgccac

SEQ ID NO: 1920 - DNA, 20 bp, Artificial Sequence
  Description of Artificial Sequence: Synthetic oligonucleotide
tgccttacagcgctgccaca

SEQ ID NO: 1921 - DNA, 20 bp, Artificial Sequence
  Description of Artificial Sequence: Synthetic oligonucleotide
gccttacagcgctgccacag

SEQ ID NO: 1922 - DNA, 20 bp, Artificial Sequence
  Description of Artificial Sequence: Synthetic oligonucleotide
ccttacagcgctgccacagc

SEQ ID NO: 1923 - DNA, 20 bp, Artificial Sequence
  Description of Artificial Sequence: Synthetic oligonucleotide
cttacagcgctgccacagca

SEQ ID NO: 1924 - DNA, 20 bp, Artificial Sequence
  Description of Artificial Sequence: Synthetic oligonucleotide
ttacagcgctgccacagcag

SEQ ID NO: 1925 - DNA, 20 bp, Artificial Sequence
  Description of Artificial Sequence: Synthetic oligonucleotide
tacagcgctgccacagcagt

SEQ ID NO: 1926 - DNA, 20 bp, Artificial Sequence
  Description of Artificial Sequence: Synthetic oligonucleotide
acagcgctgccacagcagtg

SEQ ID NO: 1927 - DNA, 20 bp, Artificial Sequence
  Description of Artificial Sequence: Synthetic oligonucleotide
cagcgctgccacagcagtgg

SEQ ID NO: 1928 - DNA, 20 bp, Artificial Sequence
  Description of Artificial Sequence: Synthetic oligonucleotide
gcgctgccacagcagtgggc

SEQ ID NO: 1929 - DNA, 20 bp, Artificial Sequence
  Description of Artificial Sequence: Synthetic oligonucleotide
cgctgccacagcagtgggcc

SEQ ID NO: 1930 - DNA, 20 bp, Artificial Sequence
  Description of Artificial Sequence: Synthetic oligonucleotide
gctgccacagcagtgggccc

SEQ ID NO: 1931 - DNA, 20 bp, Artificial Sequence
  Description of Artificial Sequence: Synthetic oligonucleotide
ctgccacagcagtgggccct

SEQ ID NO: 1932 - DNA, 20 bp, Artificial Sequence
  Description of Artificial Sequence: Synthetic oligonucleotide
tgccacagcagtgggccctg

SEQ ID NO: 1933 - DNA, 20 bp, Artificial Sequence
  Description of Artificial Sequence: Synthetic oligonucleotide
gccacagcagtgggccctga

SEQ ID NO: 1934 - DNA, 20 bp, Artificial Sequence
  Description of Artificial Sequence: Synthetic oligonucleotide
ccacagcagtgggccctgat

SEQ ID NO: 1935 - DNA, 20 bp, Artificial Sequence
  Description of Artificial Sequence: Synthetic oligonucleotide
cacagcagtgggccctgatt

SEQ ID NO: 1936 - DNA, 20 bp, Artificial Sequence
  Description of Artificial Sequence: Synthetic oligonucleotide
acagcagtgggccctgattc

SEQ ID NO: 1937 - DNA, 20 bp, Artificial Sequence
  Description of Artificial Sequence: Synthetic oligonucleotide
cagcagtgggccctgattca

SEQ ID NO: 1938 - DNA, 20 bp, Artificial Sequence
  Description of Artificial Sequence: Synthetic oligonucleotide
agcagtgggccctgattcag

SEQ ID NO: 1939 - DNA, 20 bp, Artificial Sequence
  Description of Artificial Sequence: Synthetic oligonucleotide
gcagtgggccctgattcaga

SEQ ID NO: 1940 - DNA, 20 bp, Artificial Sequence
  Description of Artificial Sequence: Synthetic oligonucleotide
cagtgggccctgattcagac

SEQ ID NO: 1941 - DNA, 20 bp, Artificial Sequence
  Description of Artificial Sequence: Synthetic oligonucleotide
agtgggccctgattcagaca

SEQ ID NO: 1942 - DNA, 20 bp, Artificial Sequence
  Description of Artificial Sequence: Synthetic oligonucleotide
gtgggccctgattcagacag

SEQ ID NO: 1943 - DNA, 20 bp, Artificial Sequence
  Description of Artificial Sequence: Synthetic oligonucleotide
tgggccctgattcagacagc

SEQ ID NO: 1944 - DNA, 20 bp, Artificial Sequence
  Description of Artificial Sequence: Synthetic oligonucleotide
gggccctgattcagacagca

SEQ ID NO: 1945 - DNA, 20 bp, Artificial Sequence
  Description of Artificial Sequence: Synthetic oligonucleotide
ggccctgattcagacagcag

SEQ ID NO: 1946 - DNA, 20 bp, Artificial Sequence
  Description of Artificial Sequence: Synthetic oligonucleotide
gccctgattcagacagcagg

SEQ ID NO: 1947 - DNA, 20 bp, Artificial Sequence
  Description of Artificial Sequence: Synthetic oligonucleotide
tggtcatcagcgactgctgg

SEQ ID NO: 1948 - DNA, 20 bp, Artificial Sequence
  Description of Artificial Sequence: Synthetic oligonucleotide
cctgattcagacagcagggg

SEQ ID NO: 1949 - DNA, 20 bp, Artificial Sequence
  Description of Artificial Sequence: Synthetic oligonucleotide
ctgattcagacagcaggggg

SEQ ID NO: 1950 - DNA, 20 bp, Artificial Sequence
  Description of Artificial Sequence: Synthetic oligonucleotide
tgattcagacagcagggggt

SEQ ID NO: 1951 - DNA, 20 bp, Artificial Sequence
  Description of Artificial Sequence: Synthetic oligonucleotide
gattcagacagcagggggtc

SEQ ID NO: 1952 - DNA, 20 bp, Artificial Sequence
  Description of Artificial Sequence: Synthetic oligonucleotide
attcagacagcagggggtca

SEQ ID NO: 1953 - DNA, 20 bp, Artificial Sequence
  Description of Artificial Sequence: Synthetic oligonucleotide
ttcagacagcagggggtcat

SEQ ID NO: 1954 - DNA, 20 bp, Artificial Sequence
  Description of Artificial Sequence: Synthetic oligonucleotide
tcagacagcagggggtcatc

SEQ ID NO: 1955 - DNA, 20 bp, Artificial Sequence
  Description of Artificial Sequence: Synthetic oligonucleotide
cagacagcagggggtcatcc

SEQ ID NO: 1956 - DNA, 20 bp, Artificial Sequence
  Description of Artificial Sequence: Synthetic oligonucleotide
agacagcagggggtcatccc

SEQ ID NO: 1957 - DNA, 20 bp, Artificial Sequence
  Description of Artificial Sequence: Synthetic oligonucleotide
gacagcagggggtcatcccc

SEQ ID NO: 1958 - DNA, 20 bp, Artificial Sequence
  Description of Artificial Sequence: Synthetic oligonucleotide
acagcagggggtcatcccct

SEQ ID NO: 1959 - DNA, 20 bp, Artificial Sequence
  Description of Artificial Sequence: Synthetic oligonucleotide
cagcagggggtcatccccta

SEQ ID NO: 1960 - DNA, 20 bp, Artificial Sequence
  Description of Artificial Sequence: Synthetic oligonucleotide
agcagggggtcatcccctaa

SEQ ID NO: 1961 - DNA, 20 bp, Artificial Sequence
  Description of Artificial Sequence: Synthetic oligonucleotide
gcagggggtcatcccctaag

SEQ ID NO: 1962 - DNA, 20 bp, Artificial Sequence
  Description of Artificial Sequence: Synthetic oligonucleotide
cagggggtcatcccctaagt

SEQ ID NO: 1963 - DNA, 20 bp, Artificial Sequence
  Description of Artificial Sequence: Synthetic oligonucleotide
agggggtcatcccctaagtg

SEQ ID NO: 1964 - DNA, 21 bp, Artificial Sequence
  Description of Artificial Sequence: Synthetic oligonucleotide
ggtcatcagcgactgctggct

SEQ ID NO: 1965 - DNA, 21 bp, Artificial Sequence
  Description of Artificial Sequence: Synthetic oligonucleotide
gtcatcagcgactgctggctt

SEQ ID NO: 1966 - DNA, 21 bp, Artificial Sequence
  Description of Artificial Sequence: Synthetic oligonucleotide
tcatcagcgactgctggcttt

SEQ ID NO: 1967 - DNA, 21 bp, Artificial Sequence
  Description of Artificial Sequence: Synthetic oligonucleotide
catcagcgactgctggctttg

SEQ ID NO: 1968 - DNA, 21 bp, Artificial Sequence
  Description of Artificial Sequence: Synthetic oligonucleotide
atcagcgactgctggctttgt

SEQ ID NO: 1969 - DNA, 21 bp, Artificial Sequence
  Description of Artificial Sequence: Synthetic oligonucleotide
tcagcgactgctggctttgtc

SEQ ID NO: 1970 - DNA, 21 bp, Artificial Sequence
  Description of Artificial Sequence: Synthetic oligonucleotide
cagcgactgctggctttgtct

SEQ ID NO: 1971 - DNA, 21 bp, Artificial Sequence
  Description of Artificial Sequence: Synthetic oligonucleotide
agcgactgctggctttgtctg

SEQ ID NO: 1972 - DNA, 21 bp, Artificial Sequence
  Description of Artificial Sequence: Synthetic oligonucleotide
gcgactgctggctttgtctgg

SEQ ID NO: 1973 - DNA, 21 bp, Artificial Sequence
  Description of Artificial Sequence: Synthetic oligonucleotide
cgactgctggctttgtctgga

SEQ ID NO: 1974 - DNA, 21 bp, Artificial Sequence
  Description of Artificial Sequence: Synthetic oligonucleotide
gactgctggctttgtctggat

SEQ ID NO: 1975 - DNA, 21 bp, Artificial Sequence
  Description of Artificial Sequence: Synthetic oligonucleotide
actgctggctttgtctggata

SEQ ID NO: 1976 - DNA, 21 bp, Artificial Sequence
  Description of Artificial Sequence: Synthetic oligonucleotide
ctgctggctttgtctggatag

SEQ ID NO: 1977 - DNA, 21 bp, Artificial Sequence
  Description of Artificial Sequence: Synthetic oligonucleotide
tgctggctttgtctggatagg

SEQ ID NO: 1978 - DNA, 21 bp, Artificial Sequence
  Description of Artificial Sequence: Synthetic oligonucleotide
gctggctttgtctggataggg

SEQ ID NO: 1979 - DNA, 21 bp, Artificial Sequence
  Description of Artificial Sequence: Synthetic oligonucleotide
ctggctttgtctggatagggt

SEQ ID NO: 1980 - DNA, 21 bp, Artificial Sequence
  Description of Artificial Sequence: Synthetic oligonucleotide
tggctttgtctggatagggtg

SEQ ID NO: 1981 - DNA, 21 bp, Artificial Sequence
  Description of Artificial Sequence: Synthetic oligonucleotide
ggctttgtctggatagggtgg

SEQ ID NO: 1982 - DNA, 21 bp, Artificial Sequence
  Description of Artificial Sequence: Synthetic oligonucleotide
gctttgtctggatagggtggg

SEQ ID NO: 1983 - DNA, 21 bp, Artificial Sequence
  Description of Artificial Sequence: Synthetic oligonucleotide
ctttgtctggatagggtgggt

SEQ ID NO: 1984 - DNA, 21 bp, Artificial Sequence
  Description of Artificial Sequence: Synthetic oligonucleotide
tttgtctggatagggtgggtt

SEQ ID NO: 1985 - DNA, 21 bp, Artificial Sequence
  Description of Artificial Sequence: Synthetic oligonucleotide
ttgtctggatagggtgggttt

SEQ ID NO: 1986 - DNA, 21 bp, Artificial Sequence
  Description of Artificial Sequence: Synthetic oligonucleotide
tgtctggatagggtgggtttc

SEQ ID NO: 1987 - DNA, 21 bp, Artificial Sequence
  Description of Artificial Sequence: Synthetic oligonucleotide
gtctggatagggtgggtttca

SEQ ID NO: 1988 - DNA, 21 bp, Artificial Sequence
  Description of Artificial Sequence: Synthetic oligonucleotide
tctggatagggtgggtttcag

SEQ ID NO: 1989 - DNA, 21 bp, Artificial Sequence
  Description of Artificial Sequence: Synthetic oligonucleotide
ctggatagggtgggtttcagg

SEQ ID NO: 1990 - DNA, 21 bp, Artificial Sequence
  Description of Artificial Sequence: Synthetic oligonucleotide
tggatagggtgggtttcaggg

SEQ ID NO: 1991 - DNA, 21 bp, Artificial Sequence
  Description of Artificial Sequence: Synthetic oligonucleotide
ggatagggtgggtttcaggga

SEQ ID NO: 1992 - DNA, 21 bp, Artificial Sequence
  Description of Artificial Sequence: Synthetic oligonucleotide
gatagggtgggtttcagggat

SEQ ID NO: 1993 - DNA, 21 bp, Artificial Sequence
  Description of Artificial Sequence: Synthetic oligonucleotide
atagggtgggtttcagggatt

SEQ ID NO: 1994 - DNA, 21 bp, Artificial Sequence
  Description of Artificial Sequence: Synthetic oligonucleotide
tagggtgggtttcagggattc

SEQ ID NO: 1995 - DNA, 21 bp, Artificial Sequence
  Description of Artificial Sequence: Synthetic oligonucleotide
agggtgggtttcagggattct

SEQ ID NO: 1996 - DNA, 21 bp, Artificial Sequence
  Description of Artificial Sequence: Synthetic oligonucleotide
gggtgggtttcagggattctg

SEQ ID NO: 1997 - DNA, 21 bp, Artificial Sequence
  Description of Artificial Sequence: Synthetic oligonucleotide
ggtgggtttcagggattctga

SEQ ID NO: 1998 - DNA, 21 bp, Artificial Sequence
  Description of Artificial Sequence: Synthetic oligonucleotide
gtgggtttcagggattctgat

SEQ ID NO: 1999 - DNA, 21 bp, Artificial Sequence
  Description of Artificial Sequence: Synthetic oligonucleotide
tgggtttcagggattctgatc

SEQ ID NO: 2000 - DNA, 21 bp, Artificial Sequence
  Description of Artificial Sequence: Synthetic oligonucleotide
gggtttcagggattctgatct

SEQ ID NO: 2001 - DNA, 21 bp, Artificial Sequence
  Description of Artificial Sequence: Synthetic oligonucleotide
ggtttcagggattctgatctc

SEQ ID NO: 2002 - DNA, 21 bp, Artificial Sequence
  Description of Artificial Sequence: Synthetic oligonucleotide
gtttcagggattctgatctca

SEQ ID NO: 2003 - DNA, 21 bp, Artificial Sequence
  Description of Artificial Sequence: Synthetic oligonucleotide
tttcagggattctgatctcac

SEQ ID NO: 2004 - DNA, 21 bp, Artificial Sequence
  Description of Artificial Sequence: Synthetic oligonucleotide
ttcagggattctgatctcacg

SEQ ID NO: 2005 - DNA, 21 bp, Artificial Sequence
  Description of Artificial Sequence: Synthetic oligonucleotide
tcagggattctgatctcacgt

SEQ ID NO: 2006 - DNA, 21 bp, Artificial Sequence
  Description of Artificial Sequence: Synthetic oligonucleotide
cagggattctgatctcacgtc

SEQ ID NO: 2007 - DNA, 21 bp, Artificial Sequence
  Description of Artificial Sequence: Synthetic oligonucleotide
agggattctgatctcacgtca

SEQ ID NO: 2008 - DNA, 21 bp, Artificial Sequence
  Description of Artificial Sequence: Synthetic oligonucleotide
gggattctgatctcacgtcac

SEQ ID NO: 2009 - DNA, 21 bp, Artificial Sequence
  Description of Artificial Sequence: Synthetic oligonucleotide
ggattctgatctcacgtcacc

SEQ ID NO: 2010 - DNA, 21 bp, Artificial Sequence
  Description of Artificial Sequence: Synthetic oligonucleotide
gattctgatctcacgtcacct

SEQ ID NO: 2011 - DNA, 21 bp, Artificial Sequence
  Description of Artificial Sequence: Synthetic oligonucleotide
attctgatctcacgtcacctg

SEQ ID NO: 2012 - DNA, 21 bp, Artificial Sequence
  Description of Artificial Sequence: Synthetic oligonucleotide
ttctgatctcacgtcacctgc

SEQ ID NO: 2013 - DNA, 21 bp, Artificial Sequence
  Description of Artificial Sequence: Synthetic oligonucleotide
tctgatctcacgtcacctgcc

SEQ ID NO: 2014 - DNA, 21 bp, Artificial Sequence
  Description of Artificial Sequence: Synthetic oligonucleotide
ctgatctcacgtcacctgcct

SEQ ID NO: 2015 - DNA, 21 bp, Artificial Sequence
  Description of Artificial Sequence: Synthetic oligonucleotide
tgatctcacgtcacctgcctt

SEQ ID NO: 2016 - DNA, 21 bp, Artificial Sequence
  Description of Artificial Sequence: Synthetic oligonucleotide
gatctcacgtcacctgcctta

SEQ ID NO: 2017 - DNA, 21 bp, Artificial Sequence
  Description of Artificial Sequence: Synthetic oligonucleotide
atctcacgtcacctgccttac

SEQ ID NO: 2018 - DNA, 21 bp, Artificial Sequence
  Description of Artificial Sequence: Synthetic oligonucleotide
tctcacgtcacctgccttaca

SEQ ID NO: 2019 - DNA, 21 bp, Artificial Sequence
  Description of Artificial Sequence: Synthetic oligonucleotide
ctcacgtcacctgccttacag

SEQ ID NO: 2020 - DNA, 21 bp, Artificial Sequence
  Description of Artificial Sequence: Synthetic oligonucleotide
tcacgtcacctgccttacagc

SEQ ID NO: 2021 - DNA, 21 bp, Artificial Sequence
  Description of Artificial Sequence: Synthetic oligonucleotide
cacgtcacctgccttacagcg

SEQ ID NO: 2022 - DNA, 21 bp, Artificial Sequence
  Description of Artificial Sequence: Synthetic oligonucleotide
acgtcacctgccttacagcgc

SEQ ID NO: 2023 - DNA, 21 bp, Artificial Sequence
  Description of Artificial Sequence: Synthetic oligonucleotide
cgtcacctgccttacagcgct

SEQ ID NO: 2024 - DNA, 21 bp, Artificial Sequence
  Description of Artificial Sequence: Synthetic oligonucleotide
gtcacctgccttacagcgctg

SEQ ID NO: 2025 - DNA, 21 bp, Artificial Sequence
  Description of Artificial Sequence: Synthetic oligonucleotide
tcacctgccttacagcgctgc

SEQ ID NO: 2026 - DNA, 21 bp, Artificial Sequence
  Description of Artificial Sequence: Synthetic oligonucleotide
cacctgccttacagcgctgcc

SEQ ID NO: 2027 - DNA, 21 bp, Artificial Sequence
  Description of Artificial Sequence: Synthetic oligonucleotide
acctgccttacagcgctgcca

SEQ ID NO: 2028 - DNA, 21 bp, Artificial Sequence
  Description of Artificial Sequence: Synthetic oligonucleotide
cctgccttacagcgctgccac

SEQ ID NO: 2029 - DNA, 21 bp, Artificial Sequence
  Description of Artificial Sequence: Synthetic oligonucleotide
ctgccttacagcgctgccaca

SEQ ID NO: 2030 - DNA, 21 bp, Artificial Sequence
  Description of Artificial Sequence: Synthetic oligonucleotide
tgccttacagcgctgccacag

SEQ ID NO: 2031 - DNA, 21 bp, Artificial Sequence
  Description of Artificial Sequence: Synthetic oligonucleotide
gccttacagcgctgccacagc

SEQ ID NO: 2032 - DNA, 21 bp, Artificial Sequence
  Description of Artificial Sequence: Synthetic oligonucleotide
ccttacagcgctgccacagca

SEQ ID NO: 2033 - DNA, 21 bp, Artificial Sequence
  Description of Artificial Sequence: Synthetic oligonucleotide
cttacagcgctgccacagcag

SEQ ID NO: 2034 - DNA, 21 bp, Artificial Sequence
  Description of Artificial Sequence: Synthetic oligonucleotide
ttacagcgctgccacagcagt

SEQ ID NO: 2035 - DNA, 21 bp, Artificial Sequence
  Description of Artificial Sequence: Synthetic oligonucleotide
tacagcgctgccacagcagtg

SEQ ID NO: 2036 - DNA, 21 bp, Artificial Sequence
  Description of Artificial Sequence: Synthetic oligonucleotide
acagcgctgccacagcagtgg

SEQ ID NO: 2037 - DNA, 21 bp, Artificial Sequence
  Description of Artificial Sequence: Synthetic oligonucleotide
cagcgctgccacagcagtggg

SEQ ID NO: 2038 - DNA, 21 bp, Artificial Sequence
  Description of Artificial Sequence: Synthetic oligonucleotide
agcgctgccacagcagtgggc

SEQ ID NO: 2039 - DNA, 21 bp, Artificial Sequence
  Description of Artificial Sequence: Synthetic oligonucleotide
gcgctgccacagcagtgggcc

SEQ ID NO: 2040 - DNA, 21 bp, Artificial Sequence
  Description of Artificial Sequence: Synthetic oligonucleotide
cgctgccacagcagtgggccc

SEQ ID NO: 2041 - DNA, 21 bp, Artificial Sequence
  Description of Artificial Sequence: Synthetic oligonucleotide
gctgccacagcagtgggccct

SEQ ID NO: 2042 - DNA, 21 bp, Artificial Sequence
  Description of Artificial Sequence: Synthetic oligonucleotide
ctgccacagcagtgggccctg

SEQ ID NO: 2043 - DNA, 21 bp, Artificial Sequence
  Description of Artificial Sequence: Synthetic oligonucleotide
tgccacagcagtgggccctga

SEQ ID NO: 2044 - DNA, 21 bp, Artificial Sequence
  Description of Artificial Sequence: Synthetic oligonucleotide
gccacagcagtgggccctgat

SEQ ID NO: 2045 - DNA, 21 bp, Artificial Sequence
  Description of Artificial Sequence: Synthetic oligonucleotide
ccacagcagtgggccctgatt

SEQ ID NO: 2046 - DNA, 21 bp, Artificial Sequence
  Description of Artificial Sequence: Synthetic oligonucleotide
cacagcagtgggccctgattc

SEQ ID NO: 2047 - DNA, 21 bp, Artificial Sequence
  Description of Artificial Sequence: Synthetic oligonucleotide
acagcagtgggccctgattca

SEQ ID NO: 2048 - DNA, 21 bp, Artificial Sequence
  Description of Artificial Sequence: Synthetic oligonucleotide
cagcagtgggccctgattcag

SEQ ID NO: 2049 - DNA, 21 bp, Artificial Sequence
  Description of Artificial Sequence: Synthetic oligonucleotide
agcagtgggccctgattcaga

SEQ ID NO: 2050 - DNA, 21 bp, Artificial Sequence
  Description of Artificial Sequence: Synthetic oligonucleotide
gcagtgggccctgattcagac

SEQ ID NO: 2051 - DNA, 21 bp, Artificial Sequence
  Description of Artificial Sequence: Synthetic oligonucleotide
cagtgggccctgattcagaca

SEQ ID NO: 2052 - DNA, 21 bp, Artificial Sequence
  Description of Artificial Sequence: Synthetic oligonucleotide
agtgggccctgattcagacag

SEQ ID NO: 2053 - DNA, 21 bp, Artificial Sequence
  Description of Artificial Sequence: Synthetic oligonucleotide
gtgggccctgattcagacagc

SEQ ID NO: 2054 - DNA, 21 bp, Artificial Sequence
  Description of Artificial Sequence: Synthetic oligonucleotide
tgggccctgattcagacagca

SEQ ID NO: 2055 - DNA, 21 bp, Artificial Sequence
  Description of Artificial Sequence: Synthetic oligonucleotide
gggccctgattcagacagcag

SEQ ID NO: 2056 - DNA, 21 bp, Artificial Sequence
  Description of Artificial Sequence: Synthetic oligonucleotide
ggccctgattcagacagcagg

SEQ ID NO: 2057 - DNA, 21 bp, Artificial Sequence
  Description of Artificial Sequence: Synthetic oligonucleotide
tggtcatcagcgactgctggc

SEQ ID NO: 2058 - DNA, 21 bp, Artificial Sequence
  Description of Artificial Sequence: Synthetic oligonucleotide
gccctgattcagacagcaggg

SEQ ID NO: 2059 - DNA, 21 bp, Artificial Sequence
  Description of Artificial Sequence: Synthetic oligonucleotide
ccctgattcagacagcagggg

SEQ ID NO: 2060 - DNA, 21 bp, Artificial Sequence
  Description of Artificial Sequence: Synthetic oligonucleotide
cctgattcagacagcaggggg

SEQ ID NO: 2061 - DNA, 21 bp, Artificial Sequence
  Description of Artificial Sequence: Synthetic oligonucleotide
ctgattcagacagcagggggt

SEQ ID NO: 2062 - DNA, 21 bp, Artificial Sequence
  Description of Artificial Sequence: Synthetic oligonucleotide
tgattcagacagcagggggtc

SEQ ID NO: 2063 - DNA, 21 bp, Artificial Sequence
  Description of Artificial Sequence: Synthetic oligonucleotide
gattcagacagcagggggtca

SEQ ID NO: 2064 - DNA, 21 bp, Artificial Sequence
  Description of Artificial Sequence: Synthetic oligonucleotide
attcagacagcagggggtcat

SEQ ID NO: 2065 - DNA, 21 bp, Artificial Sequence
  Description of Artificial Sequence: Synthetic oligonucleotide
ttcagacagcagggggtcatc

SEQ ID NO: 2066 - DNA, 21 bp, Artificial Sequence
  Description of Artificial Sequence: Synthetic oligonucleotide
tcagacagcagggggtcatcc

SEQ ID NO: 2067 - DNA, 21 bp, Artificial Sequence
  Description of Artificial Sequence: Synthetic oligonucleotide
cagacagcagggggtcatccc

SEQ ID NO: 2068 - DNA, 21 bp, Artificial Sequence
  Description of Artificial Sequence: Synthetic oligonucleotide
agacagcagggggtcatcccc

SEQ ID NO: 2069 - DNA, 21 bp, Artificial Sequence
  Description of Artificial Sequence: Synthetic oligonucleotide
gacagcagggggtcatcccct

SEQ ID NO: 2070 - DNA, 21 bp, Artificial Sequence
  Description of Artificial Sequence: Synthetic oligonucleotide
acagcagggggtcatccccta

SEQ ID NO: 2071 - DNA, 21 bp, Artificial Sequence
  Description of Artificial Sequence: Synthetic oligonucleotide
cagcagggggtcatcccctaa

SEQ ID NO: 2072 - DNA, 21 bp, Artificial Sequence
  Description of Artificial Sequence: Synthetic oligonucleotide
agcagggggtcatcccctaag

SEQ ID NO: 2073 - DNA, 21 bp, Artificial Sequence
  Description of Artificial Sequence: Synthetic oligonucleotide
gcagggggtcatcccctaagt

SEQ ID NO: 2074 - DNA, 21 bp, Artificial Sequence
  Description of Artificial Sequence: Synthetic oligonucleotide
cagggggtcatcccctaagtg

SEQ ID NO: 2075 - DNA, 22 bp, Artificial Sequence
  Description of Artificial Sequence: Synthetic oligonucleotide
ggtcatcagcgactgctggctt

SEQ ID NO: 2076 - DNA, 22 bp, Artificial Sequence
  Description of Artificial Sequence: Synthetic oligonucleotide
gtcatcagcgactgctggcttt

SEQ ID NO: 2077 - DNA, 22 bp, Artificial Sequence
  Description of Artificial Sequence: Synthetic oligonucleotide
tcatcagcgactgctggctttg

SEQ ID NO: 2078 - DNA, 22 bp, Artificial Sequence
  Description of Artificial Sequence: Synthetic oligonucleotide
catcagcgactgctggctttgt

SEQ ID NO: 2079 - DNA, 22 bp, Artificial Sequence
  Description of Artificial Sequence: Synthetic oligonucleotide
atcagcgactgctggctttgtc

SEQ ID NO: 2080 - DNA, 22 bp, Artificial Sequence
  Description of Artificial Sequence: Synthetic oligonucleotide
tcagcgactgctggctttgtct

SEQ ID NO: 2081 - DNA, 22 bp, Artificial Sequence
  Description of Artificial Sequence: Synthetic oligonucleotide
cagcgactgctggctttgtctg

SEQ ID NO: 2082 - DNA, 22 bp, Artificial Sequence
  Description of Artificial Sequence: Synthetic oligonucleotide
agcgactgctggctttgtctgg

SEQ ID NO: 2083 - DNA, 22 bp, Artificial Sequence
  Description of Artificial Sequence: Synthetic oligonucleotide
gcgactgctggctttgtctgga

SEQ ID NO: 2084 - DNA, 22 bp, Artificial Sequence
  Description of Artificial Sequence: Synthetic oligonucleotide
cgactgctggctttgtctggat

SEQ ID NO: 2085 - DNA, 22 bp, Artificial Sequence
  Description of Artificial Sequence: Synthetic oligonucleotide
gactgctggctttgtctggata

SEQ ID NO: 2086 - DNA, 22 bp, Artificial Sequence
  Description of Artificial Sequence: Synthetic oligonucleotide
actgctggctttgtctggatag

SEQ ID NO: 2087 - DNA, 22 bp, Artificial Sequence
  Description of Artificial Sequence: Synthetic oligonucleotide
ctgctggctttgtctggatagg

SEQ ID NO: 2088 - DNA, 22 bp, Artificial Sequence
  Description of Artificial Sequence: Synthetic oligonucleotide
tgctggctttgtctggataggg

SEQ ID NO: 2089 - DNA, 22 bp, Artificial Sequence
  Description of Artificial Sequence: Synthetic oligonucleotide
gctggctttgtctggatagggt

SEQ ID NO: 2090 - DNA, 22 bp, Artificial Sequence
  Description of Artificial Sequence: Synthetic oligonucleotide
ctggctttgtctggatagggtg

SEQ ID NO: 2091 - DNA, 22 bp, Artificial Sequence
  Description of Artificial Sequence: Synthetic oligonucleotide
tggctttgtctggatagggtgg

SEQ ID NO: 2092 - DNA, 22 bp, Artificial Sequence
  Description of Artificial Sequence: Synthetic oligonucleotide
ggctttgtctggatagggtggg

SEQ ID NO: 2093 - DNA, 22 bp, Artificial Sequence
  Description of Artificial Sequence: Synthetic oligonucleotide
gctttgtctggatagggtgggt

SEQ ID NO: 2094 - DNA, 22 bp, Artificial Sequence
  Description of Artificial Sequence: Synthetic oligonucleotide
ctttgtctggatagggtgggtt

SEQ ID NO: 2095 - DNA, 22 bp, Artificial Sequence
  Description of Artificial Sequence: Synthetic oligonucleotide
tttgtctggatagggtgggttt

SEQ ID NO: 2096 - DNA, 22 bp, Artificial Sequence
  Description of Artificial Sequence: Synthetic oligonucleotide
ttgtctggatagggtgggtttc

SEQ ID NO: 2097 - DNA, 22 bp, Artificial Sequence
  Description of Artificial Sequence: Synthetic oligonucleotide
tgtctggatagggtgggtttca

SEQ ID NO: 2098 - DNA, 22 bp, Artificial Sequence
  Description of Artificial Sequence: Synthetic oligonucleotide
gtctggatagggtgggtttcag

SEQ ID NO: 2099 - DNA, 22 bp, Artificial Sequence
  Description of Artificial Sequence: Synthetic oligonucleotide
tctggatagggtgggtttcagg

SEQ ID NO: 2100 - DNA, 22 bp, Artificial Sequence
  Description of Artificial Sequence: Synthetic oligonucleotide
ctggatagggtgggtttcaggg

SEQ ID NO: 2101 - DNA, 22 bp, Artificial Sequence
  Description of Artificial Sequence: Synthetic oligonucleotide
tggatagggtgggtttcaggga

SEQ ID NO: 2102 - DNA, 22 bp, Artificial Sequence
  Description of Artificial Sequence: Synthetic oligonucleotide
ggatagggtgggtttcagggat

SEQ ID NO: 2103 - DNA, 22 bp, Artificial Sequence
  Description of Artificial Sequence: Synthetic oligonucleotide
gatagggtgggtttcagggatt

SEQ ID NO: 2104 - DNA, 22 bp, Artificial Sequence
  Description of Artificial Sequence: Synthetic oligonucleotide
atagggtgggtttcagggattc

SEQ ID NO: 2105 - DNA, 22 bp, Artificial Sequence
  Description of Artificial Sequence: Synthetic oligonucleotide
tagggtgggtttcagggattct

SEQ ID NO: 2106 - DNA, 22 bp, Artificial Sequence
  Description of Artificial Sequence: Synthetic oligonucleotide
agggtgggtttcagggattctg

SEQ ID NO: 2107 - DNA, 22 bp, Artificial Sequence
  Description of Artificial Sequence: Synthetic oligonucleotide
gggtgggtttcagggattctga

SEQ ID NO: 2108 - DNA, 22 bp, Artificial Sequence
  Description of Artificial Sequence: Synthetic oligonucleotide
ggtgggtttcagggattctgat

SEQ ID NO: 2109 - DNA, 22 bp, Artificial Sequence
  Description of Artificial Sequence: Synthetic oligonucleotide
gtgggtttcagggattctgatc

SEQ ID NO: 2110 - DNA, 22 bp, Artificial Sequence
  Description of Artificial Sequence: Synthetic oligonucleotide
tgggtttcagggattctgatct

SEQ ID NO: 2111 - DNA, 22 bp, Artificial Sequence
  Description of Artificial Sequence: Synthetic oligonucleotide
gggtttcagggattctgatctc

SEQ ID NO: 2112 - DNA, 22 bp, Artificial Sequence
  Description of Artificial Sequence: Synthetic oligonucleotide
ggtttcagggattctgatctca

SEQ ID NO: 2113 - DNA, 22 bp, Artificial Sequence
  Description of Artificial Sequence: Synthetic oligonucleotide
gtttcagggattctgatctcac

SEQ ID NO: 2114 - DNA, 22 bp, Artificial Sequence
  Description of Artificial Sequence: Synthetic oligonucleotide
tttcagggattctgatctcacg

SEQ ID NO: 2115 - DNA, 22 bp, Artificial Sequence
  Description of Artificial Sequence: Synthetic oligonucleotide
ttcagggattctgatctcacgt

SEQ ID NO: 2116 - DNA, 22 bp, Artificial Sequence
  Description of Artificial Sequence: Synthetic oligonucleotide
tcagggattctgatctcacgtc

SEQ ID NO: 2117 - DNA, 22 bp, Artificial Sequence
  Description of Artificial Sequence: Synthetic oligonucleotide
cagggattctgatctcacgtca

SEQ ID NO: 2118 - DNA, 22 bp, Artificial Sequence
  Description of Artificial Sequence: Synthetic oligonucleotide
agggattctgatctcacgtcac

SEQ ID NO: 2119 - DNA, 22 bp, Artificial Sequence
  Description of Artificial Sequence: Synthetic oligonucleotide
gggattctgatctcacgtcacc

SEQ ID NO: 2120 - DNA, 22 bp, Artificial Sequence
  Description of Artificial Sequence: Synthetic oligonucleotide
ggattctgatctcacgtcacct

SEQ ID NO: 2121 - DNA, 22 bp, Artificial Sequence
  Description of Artificial Sequence: Synthetic oligonucleotide
gattctgatctcacgtcacctg

SEQ ID NO: 2122 - DNA, 22 bp, Artificial Sequence
  Description of Artificial Sequence: Synthetic oligonucleotide
attctgatctcacgtcacctgc

SEQ ID NO: 2123 - DNA, 22 bp, Artificial Sequence
  Description of Artificial Sequence: Synthetic oligonucleotide
ttctgatctcacgtcacctgcc

SEQ ID NO: 2124 - DNA, 22 bp, Artificial Sequence
  Description of Artificial Sequence: Synthetic oligonucleotide
tctgatctcacgtcacctgcct

SEQ ID NO: 2125 - DNA, 22 bp, Artificial Sequence
  Description of Artificial Sequence: Synthetic oligonucleotide
ctgatctcacgtcacctgcctt

SEQ ID NO: 2126 - DNA, 22 bp, Artificial Sequence
  Description of Artificial Sequence: Synthetic oligonucleotide
tgatctcacgtcacctgcctta

SEQ ID NO: 2127 - DNA, 22 bp, Artificial Sequence
  Description of Artificial Sequence: Synthetic oligonucleotide
gatctcacgtcacctgccttac

SEQ ID NO: 2128 - DNA, 22 bp, Artificial Sequence
  Description of Artificial Sequence: Synthetic oligonucleotide
atctcacgtcacctgccttaca

SEQ ID NO: 2129 - DNA, 22 bp, Artificial Sequence
  Description of Artificial Sequence: Synthetic oligonucleotide
tctcacgtcacctgccttacag

SEQ ID NO: 2130 - DNA, 22 bp, Artificial Sequence
  Description of Artificial Sequence: Synthetic oligonucleotide
ctcacgtcacctgccttacagc

SEQ ID NO: 2131 - DNA, 22 bp, Artificial Sequence
  Description of Artificial Sequence: Synthetic oligonucleotide
tcacgtcacctgccttacagcg

SEQ ID NO: 2132 - DNA, 22 bp, Artificial Sequence
  Description of Artificial Sequence: Synthetic oligonucleotide
cacgtcacctgccttacagcgc

SEQ ID NO: 2133 - DNA, 22 bp, Artificial Sequence
  Description of Artificial Sequence: Synthetic oligonucleotide
acgtcacctgccttacagcgct

SEQ ID NO: 2134 - DNA, 22 bp, Artificial Sequence
  Description of Artificial Sequence: Synthetic oligonucleotide
cgtcacctgccttacagcgctg

SEQ ID NO: 2135 - DNA, 22 bp, Artificial Sequence
  Description of Artificial Sequence: Synthetic oligonucleotide
gtcacctgccttacagcgctgc

SEQ ID NO: 2136 - DNA, 22 bp, Artificial Sequence
  Description of Artificial Sequence: Synthetic oligonucleotide
tcacctgccttacagcgctgcc

SEQ ID NO: 2137 - DNA, 22 bp, Artificial Sequence
  Description of Artificial Sequence: Synthetic oligonucleotide
cacctgccttacagcgctgcca

SEQ ID NO: 2138 - DNA, 22 bp, Artificial Sequence
  Description of Artificial Sequence: Synthetic oligonucleotide
acctgccttacagcgctgccac

SEQ ID NO: 2139 - DNA, 22 bp, Artificial Sequence
  Description of Artificial Sequence: Synthetic oligonucleotide
cctgccttacagcgctgccaca

SEQ ID NO: 2140 - DNA, 22 bp, Artificial Sequence
  Description of Artificial Sequence: Synthetic oligonucleotide
ctgccttacagcgctgccacag

SEQ ID NO: 2141 - DNA, 22 bp, Artificial Sequence
  Description of Artificial Sequence: Synthetic oligonucleotide
tgccttacagcgctgccacagc

SEQ ID NO: 2142 - DNA, 22 bp, Artificial Sequence
  Description of Artificial Sequence: Synthetic oligonucleotide
gccttacagcgctgccacagca

SEQ ID NO: 2143 - DNA, 22 bp, Artificial Sequence
  Description of Artificial Sequence: Synthetic oligonucleotide
ccttacagcgctgccacagcag

SEQ ID NO: 2144 - DNA, 22 bp, Artificial Sequence
  Description of Artificial Sequence: Synthetic oligonucleotide
cttacagcgctgccacagcagt

SEQ ID NO: 2145 - DNA, 22 bp, Artificial Sequence
  Description of Artificial Sequence: Synthetic oligonucleotide
ttacagcgctgccacagcagtg

SEQ ID NO: 2146 - DNA, 22 bp, Artificial Sequence
  Description of Artificial Sequence: Synthetic oligonucleotide
tacagcgctgccacagcagtgg

SEQ ID NO: 2147 - DNA, 22 bp, Artificial Sequence
  Description of Artificial Sequence: Synthetic oligonucleotide
acagcgctgccacagcagtggg

SEQ ID NO: 2148 - DNA, 22 bp, Artificial Sequence
  Description of Artificial Sequence: Synthetic oligonucleotide
cagcgctgccacagcagtgggc

SEQ ID NO: 2149 - DNA, 22 bp, Artificial Sequence
  Description of Artificial Sequence: Synthetic oligonucleotide
agcgctgccacagcagtgggcc

SEQ ID NO: 2150 - DNA, 22 bp, Artificial Sequence
  Description of Artificial Sequence: Synthetic oligonucleotide
gcgctgccacagcagtgggccc

SEQ ID NO: 2151 - DNA, 22 bp, Artificial Sequence
  Description of Artificial Sequence: Synthetic oligonucleotide
cgctgccacagcagtgggccct

SEQ ID NO: 2152 - DNA, 22 bp, Artificial Sequence
  Description of Artificial Sequence: Synthetic oligonucleotide
gctgccacagcagtgggccctg

SEQ ID NO: 2153 - DNA, 22 bp, Artificial Sequence
  Description of Artificial Sequence: Synthetic oligonucleotide
ctgccacagcagtgggccctga

SEQ ID NO: 2154 - DNA, 22 bp, Artificial Sequence
  Description of Artificial Sequence: Synthetic oligonucleotide
tgccacagcagtgggccctgat

SEQ ID NO: 2155 - DNA, 22 bp, Artificial Sequence
  Description of Artificial Sequence: Synthetic oligonucleotide
gccacagcagtgggccctgatt

SEQ ID NO: 2156 - DNA, 22 bp, Artificial Sequence
  Description of Artificial Sequence: Synthetic oligonucleotide
ccacagcagtgggccctgattc

SEQ ID NO: 2157 - DNA, 22 bp, Artificial Sequence
  Description of Artificial Sequence: Synthetic oligonucleotide
cacagcagtgggccctgattca

SEQ ID NO: 2158 - DNA, 22 bp, Artificial Sequence
  Description of Artificial Sequence: Synthetic oligonucleotide
acagcagtgggccctgattcag

SEQ ID NO: 2159 - DNA, 22 bp, Artificial Sequence
  Description of Artificial Sequence: Synthetic oligonucleotide
cagcagtgggccctgattcaga

SEQ ID NO: 2160 - DNA, 22 bp, Artificial Sequence
  Description of Artificial Sequence: Synthetic oligonucleotide
agcagtgggccctgattcagac

SEQ ID NO: 2161 - DNA, 22 bp, Artificial Sequence
  Description of Artificial Sequence: Synthetic oligonucleotide
gcagtgggccctgattcagaca

SEQ ID NO: 2162 - DNA, 22 bp, Artificial Sequence
  Description of Artificial Sequence: Synthetic oligonucleotide
cagtgggccctgattcagacag

SEQ ID NO: 2163 - DNA, 22 bp, Artificial Sequence
  Description of Artificial Sequence: Synthetic oligonucleotide
agtgggccctgattcagacagc

SEQ ID NO: 2164 - DNA, 22 bp, Artificial Sequence
  Description of Artificial Sequence: Synthetic oligonucleotide
gtgggccctgattcagacagca

SEQ ID NO: 2165 - DNA, 22 bp, Artificial Sequence
  Description of Artificial Sequence: Synthetic oligonucleotide
tgggccctgattcagacagcag

SEQ ID NO: 2166 - DNA, 22 bp, Artificial Sequence
  Description of Artificial Sequence: Synthetic oligonucleotide
gggccctgattcagacagcagg

SEQ ID NO: 2167 - DNA, 22 bp, Artificial Sequence
  Description of Artificial Sequence: Synthetic oligonucleotide
tggtcatcagcgactgctggct

SEQ ID NO: 2168 - DNA, 22 bp, Artificial Sequence
  Description of Artificial Sequence: Synthetic oligonucleotide
ggccctgattcagacagcaggg

SEQ ID NO: 2169 - DNA, 22 bp, Artificial Sequence
  Description of Artificial Sequence: Synthetic oligonucleotide
gccctgattcagacagcagggg

SEQ ID NO: 2170 - DNA, 22 bp, Artificial Sequence
  Description of Artificial Sequence: Synthetic oligonucleotide
ccctgattcagacagcaggggg

SEQ ID NO: 2171 - DNA, 22 bp, Artificial Sequence
  Description of Artificial Sequence: Synthetic oligonucleotide
cctgattcagacagcagggggt

SEQ ID NO: 2172 - DNA, 22 bp, Artificial Sequence
  Description of Artificial Sequence: Synthetic oligonucleotide
ctgattcagacagcagggggtc

SEQ ID NO: 2173 - DNA, 22 bp, Artificial Sequence
  Description of Artificial Sequence: Synthetic oligonucleotide
tgattcagacagcagggggtca

SEQ ID NO: 2174 - DNA, 22 bp, Artificial Sequence
  Description of Artificial Sequence: Synthetic oligonucleotide
gattcagacagcagggggtcat

SEQ ID NO: 2175 - DNA, 22 bp, Artificial Sequence
  Description of Artificial Sequence: Synthetic oligonucleotide
attcagacagcagggggtcatc

SEQ ID NO: 2176 - DNA, 22 bp, Artificial Sequence
  Description of Artificial Sequence: Synthetic oligonucleotide
ttcagacagcagggggtcatcc

SEQ ID NO: 2177 - DNA, 22 bp, Artificial Sequence
  Description of Artificial Sequence: Synthetic oligonucleotide
tcagacagcagggggtcatccc

SEQ ID NO: 2178 - DNA, 22 bp, Artificial Sequence
  Description of Artificial Sequence: Synthetic oligonucleotide
cagacagcagggggtcatcccc

SEQ ID NO: 2179 - DNA, 22 bp, Artificial Sequence
  Description of Artificial Sequence: Synthetic oligonucleotide
agacagcagggggtcatcccct

SEQ ID NO: 2180 - DNA, 22 bp, Artificial Sequence
  Description of Artificial Sequence: Synthetic oligonucleotide
gacagcagggggtcatccccta

SEQ ID NO: 2181 - DNA, 22 bp, Artificial Sequence
  Description of Artificial Sequence: Synthetic oligonucleotide
acagcagggggtcatcccctaa

SEQ ID NO: 2182 - DNA, 22 bp, Artificial Sequence
  Description of Artificial Sequence: Synthetic oligonucleotide
cagcagggggtcatcccctaag

SEQ ID NO: 2183 - DNA, 22 bp, Artificial Sequence
  Description of Artificial Sequence: Synthetic oligonucleotide
agcagggggtcatcccctaagt

SEQ ID NO: 2184 - DNA, 22 bp, Artificial Sequence
  Description of Artificial Sequence: Synthetic oligonucleotide
gcagggggtcatcccctaagtg

SEQ ID NO: 2185 - DNA, 25 bp, Artificial Sequence
  Description of Artificial Sequence: Synthetic oligonucleotide
cagggggtcatcccctaagtgcatt

SEQ ID NO: 2186 - DNA, 25 bp, Artificial Sequence
  Description of Artificial Sequence: Synthetic oligonucleotide
agggggtcatcccctaagtgcattt

SEQ ID NO: 2187 - DNA, 25 bp, Artificial Sequence
  Description of Artificial Sequence: Synthetic oligonucleotide
gggggtcatcccctaagtgcatttc

SEQ ID NO: 2188 - DNA, 25 bp, Artificial Sequence
  Description of Artificial Sequence: Synthetic oligonucleotide
ggggtcatcccctaagtgcatttca

SEQ ID NO: 2189 - DNA, 25 bp, Artificial Sequence
  Description of Artificial Sequence: Synthetic oligonucleotide
gggtcatcccctaagtgcatttcac

SEQ ID NO: 2190 - DNA, 25 bp, Artificial Sequence
  Description of Artificial Sequence: Synthetic oligonucleotide
ggtcatcccctaagtgcatttcact

SEQ ID NO: 2191 - DNA, 25 bp, Artificial Sequence
  Description of Artificial Sequence: Synthetic oligonucleotide
gtcatcccctaagtgcatttcactg

SEQ ID NO: 2192 - DNA, 25 bp, Artificial Sequence
  Description of Artificial Sequence: Synthetic oligonucleotide
tcatcccctaagtgcatttcactga

SEQ ID NO: 2193 - DNA, 25 bp, Artificial Sequence
  Description of Artificial Sequence: Synthetic oligonucleotide
catcccctaagtgcatttcactgat

SEQ ID NO: 2194 - DNA, 25 bp, Artificial Sequence
  Description of Artificial Sequence: Synthetic oligonucleotide
atcccctaagtgcatttcactgatg

SEQ ID NO: 2195 - DNA, 25 bp, Artificial Sequence
  Description of Artificial Sequence: Synthetic oligonucleotide
tcccctaagtgcatttcactgatgt

SEQ ID NO: 2196 - DNA, 25 bp, Artificial Sequence
  Description of Artificial Sequence: Synthetic oligonucleotide
cccctaagtgcatttcactgatgta

SEQ ID NO: 2197 - DNA, 25 bp, Artificial Sequence
  Description of Artificial Sequence: Synthetic oligonucleotide
ccctaagtgcatttcactgatgtaa

SEQ ID NO: 2198 - DNA, 25 bp, Artificial Sequence
  Description of Artificial Sequence: Synthetic oligonucleotide
cctaagtgcatttcactgatgtaaa

SEQ ID NO: 2199 - DNA, 25 bp, Artificial Sequence
  Description of Artificial Sequence: Synthetic oligonucleotide
ctaagtgcatttcactgatgtaaat

SEQ ID NO: 2200 - DNA, 25 bp, Artificial Sequence
  Description of Artificial Sequence: Synthetic oligonucleotide
taagtgcatttcactgatgtaaatt

SEQ ID NO: 2201 - DNA, 25 bp, Artificial Sequence
  Description of Artificial Sequence: Synthetic oligonucleotide
aagtgcatttcactgatgtaaatta

SEQ ID NO: 2202 - DNA, 25 bp, Artificial Sequence
  Description of Artificial Sequence: Synthetic oligonucleotide
agtgcatttcactgatgtaaattat

SEQ ID NO: 2203 - DNA, 25 bp, Artificial Sequence
  Description of Artificial Sequence: Synthetic oligonucleotide
gtgcatttcactgatgtaaattatc

SEQ ID NO: 2204 - DNA, 25 bp, Artificial Sequence
  Description of Artificial Sequence: Synthetic oligonucleotide
tgcatttcactgatgtaaattatca

SEQ ID NO: 2205 - DNA, 25 bp, Artificial Sequence
  Description of Artificial Sequence: Synthetic oligonucleotide
gcatttcactgatgtaaattatcat

SEQ ID NO: 2206 - DNA, 25 bp, Artificial Sequence
  Description of Artificial Sequence: Synthetic oligonucleotide
catttcactgatgtaaattatcatt

SEQ ID NO: 2207 - DNA, 25 bp, Artificial Sequence
  Description of Artificial Sequence: Synthetic oligonucleotide
atttcactgatgtaaattatcattc

SEQ ID NO: 2208 - DNA, 25 bp, Artificial Sequence
  Description of Artificial Sequence: Synthetic oligonucleotide
tttcactgatgtaaattatcattca

SEQ ID NO: 2209 - DNA, 25 bp, Artificial Sequence
  Description of Artificial Sequence: Synthetic oligonucleotide
ttcactgatgtaaattatcattcac

SEQ ID NO: 2210 - DNA, 25 bp, Artificial Sequence
  Description of Artificial Sequence: Synthetic oligonucleotide
tcactgatgtaaattatcattcaca

SEQ ID NO: 2211 - DNA, 25 bp, Artificial Sequence
  Description of Artificial Sequence: Synthetic oligonucleotide
cactgatgtaaattatcattcacag

SEQ ID NO: 2212 - DNA, 25 bp, Artificial Sequence
  Description of Artificial Sequence: Synthetic oligonucleotide
actgatgtaaattatcattcacagc

SEQ ID NO: 2213 - DNA, 25 bp, Artificial Sequence
  Description of Artificial Sequence: Synthetic oligonucleotide
ctgatgtaaattatcattcacagcc

SEQ ID NO: 2214 - DNA, 25 bp, Artificial Sequence
  Description of Artificial Sequence: Synthetic oligonucleotide
tgatgtaaattatcattcacagccc

SEQ ID NO: 2215 - DNA, 25 bp, Artificial Sequence
  Description of Artificial Sequence: Synthetic oligonucleotide
gatgtaaattatcattcacagccca

SEQ ID NO: 2216 - DNA, 25 bp, Artificial Sequence
  Description of Artificial Sequence: Synthetic oligonucleotide
atgtaaattatcattcacagcccag

SEQ ID NO: 2217 - DNA, 25 bp, Artificial Sequence
  Description of Artificial Sequence: Synthetic oligonucleotide
tgtaaattatcattcacagcccagt

SEQ ID NO: 2218 - DNA, 25 bp, Artificial Sequence
  Description of Artificial Sequence: Synthetic oligonucleotide
gtaaattatcattcacagcccagtg

SEQ ID NO: 2219 - DNA, 25 bp, Artificial Sequence
  Description of Artificial Sequence: Synthetic oligonucleotide
taaattatcattcacagcccagtgc

SEQ ID NO: 2220 - DNA, 25 bp, Artificial Sequence
  Description of Artificial Sequence: Synthetic oligonucleotide
aaattatcattcacagcccagtgcc

SEQ ID NO: 2221 - DNA, 25 bp, Artificial Sequence
  Description of Artificial Sequence: Synthetic oligonucleotide
aattatcattcacagcccagtgccc

SEQ ID NO: 2222 - DNA, 25 bp, Artificial Sequence
  Description of Artificial Sequence: Synthetic oligonucleotide
attatcattcacagcccagtgcccc

SEQ ID NO: 2223 - DNA, 25 bp, Artificial Sequence
  Description of Artificial Sequence: Synthetic oligonucleotide
ttatcattcacagcccagtgcccca

SEQ ID NO: 2224 - DNA, 25 bp, Artificial Sequence
  Description of Artificial Sequence: Synthetic oligonucleotide
tatcattcacagcccagtgccccag

SEQ ID NO: 2225 - DNA, 25 bp, Artificial Sequence
  Description of Artificial Sequence: Synthetic oligonucleotide
atcattcacagcccagtgccccagc

SEQ ID NO: 2226 - DNA, 25 bp, Artificial Sequence
  Description of Artificial Sequence: Synthetic oligonucleotide
tcattcacagcccagtgccccagct

SEQ ID NO: 2227 - DNA, 25 bp, Artificial Sequence
  Description of Artificial Sequence: Synthetic oligonucleotide
cattcacagcccagtgccccagctg

SEQ ID NO: 2228 - DNA, 25 bp, Artificial Sequence
  Description of Artificial Sequence: Synthetic oligonucleotide
attcacagcccagtgccccagctgg

SEQ ID NO: 2229 - DNA, 25 bp, Artificial Sequence
  Description of Artificial Sequence: Synthetic oligonucleotide
ttcacagcccagtgccccagctggg

SEQ ID NO: 2230 - DNA, 25 bp, Artificial Sequence
  Description of Artificial Sequence: Synthetic oligonucleotide
tcacagcccagtgccccagctggga

SEQ ID NO: 2231 - DNA, 25 bp, Artificial Sequence
  Description of Artificial Sequence: Synthetic oligonucleotide
cacagcccagtgccccagctgggag

SEQ ID NO: 2232 - DNA, 25 bp, Artificial Sequence
  Description of Artificial Sequence: Synthetic oligonucleotide
acagcccagtgccccagctgggaga

SEQ ID NO: 2233 - DNA, 25 bp, Artificial Sequence
  Description of Artificial Sequence: Synthetic oligonucleotide
cagcccagtgccccagctgggagag

SEQ ID NO: 2234 - DNA, 25 bp, Artificial Sequence
  Description of Artificial Sequence: Synthetic oligonucleotide
agcccagtgccccagctgggagagc

SEQ ID NO: 2235 - DNA, 25 bp, Artificial Sequence
  Description of Artificial Sequence: Synthetic oligonucleotide
gcccagtgccccagctgggagagcg

SEQ ID NO: 2236 - DNA, 25 bp, Artificial Sequence
  Description of Artificial Sequence: Synthetic oligonucleotide
cccagtgccccagctgggagagcgc

SEQ ID NO: 2237 - DNA, 25 bp, Artificial Sequence
  Description of Artificial Sequence: Synthetic oligonucleotide
ccagtgccccagctgggagagcgcg

SEQ ID NO: 2238 - DNA, 25 bp, Artificial Sequence
  Description of Artificial Sequence: Synthetic oligonucleotide
cagtgccccagctgggagagcgcgt

SEQ ID NO: 2239 - DNA, 25 bp, Artificial Sequence
  Description of Artificial Sequence: Synthetic oligonucleotide
agtgccccagctgggagagcgcgtt

SEQ ID NO: 2240 - DNA, 25 bp, Artificial Sequence
  Description of Artificial Sequence: Synthetic oligonucleotide
gtgccccagctgggagagcgcgttc

SEQ ID NO: 2241 - DNA, 25 bp, Artificial Sequence
  Description of Artificial Sequence: Synthetic oligonucleotide
tgccccagctgggagagcgcgttca

SEQ ID NO: 2242 - DNA, 25 bp, Artificial Sequence
  Description of Artificial Sequence: Synthetic oligonucleotide
gccccagctgggagagcgcgttcat

SEQ ID NO: 2243 - DNA, 25 bp, Artificial Sequence
  Description of Artificial Sequence: Synthetic oligonucleotide
ccccagctgggagagcgcgttcatc

SEQ ID NO: 2244 - DNA, 25 bp, Artificial Sequence
  Description of Artificial Sequence: Synthetic oligonucleotide
cccagctgggagagcgcgttcatca

SEQ ID NO: 2245 - DNA, 25 bp, Artificial Sequence
  Description of Artificial Sequence: Synthetic oligonucleotide
ccagctgggagagcgcgttcatcaa

SEQ ID NO: 2246 - DNA, 25 bp, Artificial Sequence
  Description of Artificial Sequence: Synthetic oligonucleotide
cagctgggagagcgcgttcatcaac

SEQ ID NO: 2247 - DNA, 25 bp, Artificial Sequence
  Description of Artificial Sequence: Synthetic oligonucleotide
agctgggagagcgcgttcatcaact

SEQ ID NO: 2248 - DNA, 25 bp, Artificial Sequence
  Description of Artificial Sequence: Synthetic oligonucleotide
gctgggagagcgcgttcatcaactg

SEQ ID NO: 2249 - DNA, 25 bp, Artificial Sequence
  Description of Artificial Sequence: Synthetic oligonucleotide
ctgggagagcgcgttcatcaactgt

SEQ ID NO: 2250 - DNA, 25 bp, Artificial Sequence
  Description of Artificial Sequence: Synthetic oligonucleotide
tgggagagcgcgttcatcaactgtc

SEQ ID NO: 2251 - DNA, 25 bp, Artificial Sequence
  Description of Artificial Sequence: Synthetic oligonucleotide
gggagagcgcgttcatcaactgtca

SEQ ID NO: 2252 - DNA, 25 bp, Artificial Sequence
  Description of Artificial Sequence: Synthetic oligonucleotide
ggagagcgcgttcatcaactgtcac

SEQ ID NO: 2253 - DNA, 25 bp, Artificial Sequence
  Description of Artificial Sequence: Synthetic oligonucleotide
gagagcgcgttcatcaactgtcacg

SEQ ID NO: 2254 - DNA, 25 bp, Artificial Sequence
  Description of Artificial Sequence: Synthetic oligonucleotide
agagcgcgttcatcaactgtcacgg

SEQ ID NO: 2255 - DNA, 25 bp, Artificial Sequence
  Description of Artificial Sequence: Synthetic oligonucleotide
gagcgcgttcatcaactgtcacggg

SEQ ID NO: 2256 - DNA, 25 bp, Artificial Sequence
  Description of Artificial Sequence: Synthetic oligonucleotide
agcgcgttcatcaactgtcacgggt

SEQ ID NO: 2257 - DNA, 25 bp, Artificial Sequence
  Description of Artificial Sequence: Synthetic oligonucleotide
gcgcgttcatcaactgtcacgggtg

SEQ ID NO: 2258 - DNA, 25 bp, Artificial Sequence
  Description of Artificial Sequence: Synthetic oligonucleotide
cgcgttcatcaactgtcacgggtgg

SEQ ID NO: 2259 - DNA, 25 bp, Artificial Sequence
  Description of Artificial Sequence: Synthetic oligonucleotide
gcgttcatcaactgtcacgggtggt

SEQ ID NO: 2260 - DNA, 25 bp, Artificial Sequence
  Description of Artificial Sequence: Synthetic oligonucleotide
cgttcatcaactgtcacgggtggtg

SEQ ID NO: 2261 - DNA, 25 bp, Artificial Sequence
  Description of Artificial Sequence: Synthetic oligonucleotide
gttcatcaactgtcacgggtggtga

SEQ ID NO: 2262 - DNA, 25 bp, Artificial Sequence
  Description of Artificial Sequence: Synthetic oligonucleotide
ttcatcaactgtcacgggtggtgag

SEQ ID NO: 2263 - DNA, 25 bp, Artificial Sequence
  Description of Artificial Sequence: Synthetic oligonucleotide
tcatcaactgtcacgggtggtgagg

SEQ ID NO: 2264 - DNA, 25 bp, Artificial Sequence
  Description of Artificial Sequence: Synthetic oligonucleotide
catcaactgtcacgggtggtgagga

SEQ ID NO: 2265 - DNA, 25 bp, Artificial Sequence
  Description of Artificial Sequence: Synthetic oligonucleotide
atcaactgtcacgggtggtgaggaa

SEQ ID NO: 2266 - DNA, 25 bp, Artificial Sequence
  Description of Artificial Sequence: Synthetic oligonucleotide
tcaactgtcacgggtggtgaggaac

SEQ ID NO: 2267 - DNA, 25 bp, Artificial Sequence
  Description of Artificial Sequence: Synthetic oligonucleotide
caactgtcacgggtggtgaggaacc

SEQ ID NO: 2268 - DNA, 25 bp, Artificial Sequence
  Description of Artificial Sequence: Synthetic oligonucleotide
aactgtcacgggtggtgaggaacca

SEQ ID NO: 2269 - DNA, 25 bp, Artificial Sequence
  Description of Artificial Sequence: Synthetic oligonucleotide
actgtcacgggtggtgaggaaccaa

SEQ ID NO: 2270 - DNA, 25 bp, Artificial Sequence
  Description of Artificial Sequence: Synthetic oligonucleotide
ctgtcacgggtggtgaggaaccaac

SEQ ID NO: 2271 - DNA, 25 bp, Artificial Sequence
  Description of Artificial Sequence: Synthetic oligonucleotide
tgtcacgggtggtgaggaaccaacg

SEQ ID NO: 2272 - DNA, 25 bp, Artificial Sequence
  Description of Artificial Sequence: Synthetic oligonucleotide
gtcacgggtggtgaggaaccaacgg

SEQ ID NO: 2273 - DNA, 25 bp, Artificial Sequence
  Description of Artificial Sequence: Synthetic oligonucleotide
tcacgggtggtgaggaaccaacggt

SEQ ID NO: 2274 - DNA, 25 bp, Artificial Sequence
  Description of Artificial Sequence: Synthetic oligonucleotide
cacgggtggtgaggaaccaacggta

SEQ ID NO: 2275 - DNA, 25 bp, Artificial Sequence
  Description of Artificial Sequence: Synthetic oligonucleotide
acgggtggtgaggaaccaacggtaa

SEQ ID NO: 2276 - DNA, 25 bp, Artificial Sequence
  Description of Artificial Sequence: Synthetic oligonucleotide
cgggtggtgaggaaccaacggtaat

SEQ ID NO: 2277 - DNA, 25 bp, Artificial Sequence
  Description of Artificial Sequence: Synthetic oligonucleotide
gggtggtgaggaaccaacggtaatg

SEQ ID NO: 2278 - DNA, 25 bp, Artificial Sequence
  Description of Artificial Sequence: Synthetic oligonucleotide
ggtggtgaggaaccaacggtaatga

SEQ ID NO: 2279 - DNA, 25 bp, Artificial Sequence
  Description of Artificial Sequence: Synthetic oligonucleotide
gtggtgaggaaccaacggtaatgat

SEQ ID NO: 2280 - DNA, 25 bp, Artificial Sequence
  Description of Artificial Sequence: Synthetic oligonucleotide
tggtgaggaaccaacggtaatgatc

SEQ ID NO: 2281 - DNA, 25 bp, Artificial Sequence
  Description of Artificial Sequence: Synthetic oligonucleotide
ggtgaggaaccaacggtaatgatcc

SEQ ID NO: 2282 - DNA, 25 bp, Artificial Sequence
  Description of Artificial Sequence: Synthetic oligonucleotide
gtgaggaaccaacggtaatgatcca

SEQ ID NO: 2283 - DNA, 25 bp, Artificial Sequence
  Description of Artificial Sequence: Synthetic oligonucleotide
tgaggaaccaacggtaatgatccac

SEQ ID NO: 2284 - DNA, 25 bp, Artificial Sequence
  Description of Artificial Sequence: Synthetic oligonucleotide
gaggaaccaacggtaatgatccact

SEQ ID NO: 2285 - DNA, 25 bp, Artificial Sequence
  Description of Artificial Sequence: Synthetic oligonucleotide
aggaaccaacggtaatgatccactt

SEQ ID NO: 2286 - DNA, 25 bp, Artificial Sequence
  Description of Artificial Sequence: Synthetic oligonucleotide
ggaaccaacggtaatgatccacttt

SEQ ID NO: 2287 - DNA, 25 bp, Artificial Sequence
  Description of Artificial Sequence: Synthetic oligonucleotide
gaaccaacggtaatgatccacttta

SEQ ID NO: 2288 - DNA, 25 bp, Artificial Sequence
  Description of Artificial Sequence: Synthetic oligonucleotide
aaccaacggtaatgatccactttat

SEQ ID NO: 2289 - DNA, 25 bp, Artificial Sequence
  Description of Artificial Sequence: Synthetic oligonucleotide
accaacggtaatgatccactttatc

SEQ ID NO: 2290 - DNA, 25 bp, Artificial Sequence
  Description of Artificial Sequence: Synthetic oligonucleotide
ccaacggtaatgatccactttatca

SEQ ID NO: 2291 - DNA, 25 bp, Artificial Sequence
  Description of Artificial Sequence: Synthetic oligonucleotide
caacggtaatgatccactttatcag

SEQ ID NO: 2292 - DNA, 25 bp, Artificial Sequence
  Description of Artificial Sequence: Synthetic oligonucleotide
aacggtaatgatccactttatcaga

SEQ ID NO: 2293 - DNA, 25 bp, Artificial Sequence
  Description of Artificial Sequence: Synthetic oligonucleotide
acggtaatgatccactttatcagac

SEQ ID NO: 2294 - DNA, 25 bp, Artificial Sequence
  Description of Artificial Sequence: Synthetic oligonucleotide
cggtaatgatccactttatcagaca

SEQ ID NO: 2295 - DNA, 25 bp, Artificial Sequence
  Description of Artificial Sequence: Synthetic oligonucleotide
ggtaatgatccactttatcagacat

SEQ ID NO: 2296 - DNA, 25 bp, Artificial Sequence
  Description of Artificial Sequence: Synthetic oligonucleotide
gtaatgatccactttatcagacatc

SEQ ID NO: 2297 - DNA, 25 bp, Artificial Sequence
  Description of Artificial Sequence: Synthetic oligonucleotide
taatgatccactttatcagacatca

SEQ ID NO: 2298 - DNA, 25 bp, Artificial Sequence
  Description of Artificial Sequence: Synthetic oligonucleotide
aatgatccactttatcagacatcaa

SEQ ID NO: 2299 - DNA, 25 bp, Artificial Sequence
  Description of Artificial Sequence: Synthetic oligonucleotide
atgatccactttatcagacatcaat

SEQ ID NO: 2300 - DNA, 25 bp, Artificial Sequence
  Description of Artificial Sequence: Synthetic oligonucleotide
tgatccactttatcagacatcaata

SEQ ID NO: 2301 - DNA, 25 bp, Artificial Sequence
  Description of Artificial Sequence: Synthetic oligonucleotide
gatccactttatcagacatcaatag

SEQ ID NO: 2302 - DNA, 25 bp, Artificial Sequence
  Description of Artificial Sequence: Synthetic oligonucleotide
atccactttatcagacatcaatagc

SEQ ID NO: 2303 - DNA, 25 bp, Artificial Sequence
  Description of Artificial Sequence: Synthetic oligonucleotide
tccactttatcagacatcaatagca

SEQ ID NO: 2304 - DNA, 25 bp, Artificial Sequence
  Description of Artificial Sequence: Synthetic oligonucleotide
ccactttatcagacatcaatagcaa

SEQ ID NO: 2305 - DNA, 25 bp, Artificial Sequence
  Description of Artificial Sequence: Synthetic oligonucleotide
cactttatcagacatcaatagcaag

SEQ ID NO: 2306 - DNA, 25 bp, Artificial Sequence
  Description of Artificial Sequence: Synthetic oligonucleotide
actttatcagacatcaatagcaaga

SEQ ID NO: 2307 - DNA, 25 bp, Artificial Sequence
  Description of Artificial Sequence: Synthetic oligonucleotide
ctttatcagacatcaatagcaagag

SEQ ID NO: 2308 - DNA, 25 bp, Artificial Sequence
  Description of Artificial Sequence: Synthetic oligonucleotide
tttatcagacatcaatagcaagagg

SEQ ID NO: 2309 - DNA, 25 bp, Artificial Sequence
  Description of Artificial Sequence: Synthetic oligonucleotide
ttatcagacatcaatagcaagaggc

SEQ ID NO: 2310 - DNA, 25 bp, Artificial Sequence
  Description of Artificial Sequence: Synthetic oligonucleotide
tatcagacatcaatagcaagaggcc

SEQ ID NO: 2311 - DNA, 25 bp, Artificial Sequence
  Description of Artificial Sequence: Synthetic oligonucleotide
atcagacatcaatagcaagaggccg

SEQ ID NO: 2312 - DNA, 25 bp, Artificial Sequence
  Description of Artificial Sequence: Synthetic oligonucleotide
tcagacatcaatagcaagaggccgt

SEQ ID NO: 2313 - DNA, 25 bp, Artificial Sequence
  Description of Artificial Sequence: Synthetic oligonucleotide
cagacatcaatagcaagaggccgtg

SEQ ID NO: 2314 - DNA, 25 bp, Artificial Sequence
  Description of Artificial Sequence: Synthetic oligonucleotide
agacatcaatagcaagaggccgtga

SEQ ID NO: 2315 - DNA, 25 bp, Artificial Sequence
  Description of Artificial Sequence: Synthetic oligonucleotide
gacatcaatagcaagaggccgtgag

SEQ ID NO: 2316 - DNA, 25 bp, Artificial Sequence
  Description of Artificial Sequence: Synthetic oligonucleotide
acatcaatagcaagaggccgtgagg

SEQ ID NO: 2317 - DNA, 25 bp, Artificial Sequence
  Description of Artificial Sequence: Synthetic oligonucleotide
catcaatagcaagaggccgtgaggc

SEQ ID NO: 2318 - DNA, 25 bp, Artificial Sequence
  Description of Artificial Sequence: Synthetic oligonucleotide
atcaatagcaagaggccgtgaggca

SEQ ID NO: 2319 - DNA, 25 bp, Artificial Sequence
  Description of Artificial Sequence: Synthetic oligonucleotide
tcaatagcaagaggccgtgaggcag

SEQ ID NO: 2320 - DNA, 25 bp, Artificial Sequence
  Description of Artificial Sequence: Synthetic oligonucleotide
caatagcaagaggccgtgaggcagt

SEQ ID NO: 2321 - DNA, 25 bp, Artificial Sequence
  Description of Artificial Sequence: Synthetic oligonucleotide
aatagcaagaggccgtgaggcagtt

SEQ ID NO: 2322 - DNA, 25 bp, Artificial Sequence
  Description of Artificial Sequence: Synthetic oligonucleotide
tcattattccggttccacagctatt

SEQ ID NO: 2323 - DNA, 25 bp, Artificial Sequence
  Description of Artificial Sequence: Synthetic oligonucleotide
cattattccggttccacagctatta

SEQ ID NO: 2324 - DNA, 25 bp, Artificial Sequence
  Description of Artificial Sequence: Synthetic oligonucleotide
attattccggttccacagctattag

SEQ ID NO: 2325 - DNA, 25 bp, Artificial Sequence
  Description of Artificial Sequence: Synthetic oligonucleotide
ttattccggttccacagctattaga

SEQ ID NO: 2326 - DNA, 25 bp, Artificial Sequence
  Description of Artificial Sequence: Synthetic oligonucleotide
tattccggttccacagctattagac

SEQ ID NO: 2327 - DNA, 25 bp, Artificial Sequence
  Description of Artificial Sequence: Synthetic oligonucleotide
attccggttccacagctattagacc

SEQ ID NO: 2328 - DNA, 25 bp, Artificial Sequence
  Description of Artificial Sequence: Synthetic oligonucleotide
ttccggttccacagctattagacca

SEQ ID NO: 2329 - DNA, 25 bp, Artificial Sequence
  Description of Artificial Sequence: Synthetic oligonucleotide
tccggttccacagctattagaccaa

SEQ ID NO: 2330 - DNA, 25 bp, Artificial Sequence
  Description of Artificial Sequence: Synthetic oligonucleotide
ccggttccacagctattagaccaac

SEQ ID NO: 2331 - DNA, 25 bp, Artificial Sequence
  Description of Artificial Sequence: Synthetic oligonucleotide
cggttccacagctattagaccaact

SEQ ID NO: 2332 - DNA, 25 bp, Artificial Sequence
  Description of Artificial Sequence: Synthetic oligonucleotide
ggttccacagctattagaccaactc

SEQ ID NO: 2333 - DNA, 25 bp, Artificial Sequence
  Description of Artificial Sequence: Synthetic oligonucleotide
gttccacagctattagaccaactca

SEQ ID NO: 2334 - DNA, 25 bp, Artificial Sequence
  Description of Artificial Sequence: Synthetic oligonucleotide
ttccacagctattagaccaactcag

SEQ ID NO: 2335 - DNA, 25 bp, Artificial Sequence
  Description of Artificial Sequence: Synthetic oligonucleotide
tccacagctattagaccaactcagg

SEQ ID NO: 2336 - DNA, 25 bp, Artificial Sequence
  Description of Artificial Sequence: Synthetic oligonucleotide
ccacagctattagaccaactcaggt

SEQ ID NO: 2337 - DNA, 25 bp, Artificial Sequence
  Description of Artificial Sequence: Synthetic oligonucleotide
cacagctattagaccaactcaggtg

SEQ ID NO: 2338 - DNA, 25 bp, Artificial Sequence
  Description of Artificial Sequence: Synthetic oligonucleotide
acagctattagaccaactcaggtgg

SEQ ID NO: 2339 - DNA, 25 bp, Artificial Sequence
  Description of Artificial Sequence: Synthetic oligonucleotide
cagctattagaccaactcaggtggt

SEQ ID NO: 2340 - DNA, 25 bp, Artificial Sequence
  Description of Artificial Sequence: Synthetic oligonucleotide
agctattagaccaactcaggtggtc

SEQ ID NO: 2341 - DNA, 25 bp, Artificial Sequence
  Description of Artificial Sequence: Synthetic oligonucleotide
gctattagaccaactcaggtggtct

SEQ ID NO: 2342 - DNA, 25 bp, Artificial Sequence
  Description of Artificial Sequence: Synthetic oligonucleotide
ctattagaccaactcaggtggtcta

SEQ ID NO: 2343 - DNA, 25 bp, Artificial Sequence
  Description of Artificial Sequence: Synthetic oligonucleotide
tattagaccaactcaggtggtctat

SEQ ID NO: 2344 - DNA, 25 bp, Artificial Sequence
  Description of Artificial Sequence: Synthetic oligonucleotide
attagaccaactcaggtggtctatg

SEQ ID NO: 2345 - DNA, 25 bp, Artificial Sequence
  Description of Artificial Sequence: Synthetic oligonucleotide
ttagaccaactcaggtggtctatga

SEQ ID NO: 2346 - DNA, 25 bp, Artificial Sequence
  Description of Artificial Sequence: Synthetic oligonucleotide
tagaccaactcaggtggtctatgat

SEQ ID NO: 2347 - DNA, 25 bp, Artificial Sequence
  Description of Artificial Sequence: Synthetic oligonucleotide
agaccaactcaggtggtctatgata

SEQ ID NO: 2348 - DNA, 25 bp, Artificial Sequence
  Description of Artificial Sequence: Synthetic oligonucleotide
gaccaactcaggtggtctatgatac

SEQ ID NO: 2349 - DNA, 25 bp, Artificial Sequence
  Description of Artificial Sequence: Synthetic oligonucleotide
accaactcaggtggtctatgatacc

SEQ ID NO: 2350 - DNA, 25 bp, Artificial Sequence
  Description of Artificial Sequence: Synthetic oligonucleotide
ccaactcaggtggtctatgatacct

SEQ ID NO: 2351 - DNA, 25 bp, Artificial Sequence
  Description of Artificial Sequence: Synthetic oligonucleotide
caactcaggtggtctatgatacctg

SEQ ID NO: 2352 - DNA, 25 bp, Artificial Sequence
  Description of Artificial Sequence: Synthetic oligonucleotide
aactcaggtggtctatgatacctga

SEQ ID NO: 2353 - DNA, 25 bp, Artificial Sequence
  Description of Artificial Sequence: Synthetic oligonucleotide
actcaggtggtctatgatacctgat

SEQ ID NO: 2354 - DNA, 25 bp, Artificial Sequence
  Description of Artificial Sequence: Synthetic oligonucleotide
ctcaggtggtctatgatacctgata

SEQ ID NO: 2355 - DNA, 25 bp, Artificial Sequence
  Description of Artificial Sequence: Synthetic oligonucleotide
tcaggtggtctatgatacctgatat

SEQ ID NO: 2356 - DNA, 25 bp, Artificial Sequence
  Description of Artificial Sequence: Synthetic oligonucleotide
caggtggtctatgatacctgatatg

SEQ ID NO: 2357 - DNA, 25 bp, Artificial Sequence
  Description of Artificial Sequence: Synthetic oligonucleotide
aggtggtctatgatacctgatatga

SEQ ID NO: 2358 - DNA, 25 bp, Artificial Sequence
  Description of Artificial Sequence: Synthetic oligonucleotide
ggtggtctatgatacctgatatgac

SEQ ID NO: 2359 - DNA, 25 bp, Artificial Sequence
  Description of Artificial Sequence: Synthetic oligonucleotide
gtggtctatgatacctgatatgacg

SEQ ID NO: 2360 - DNA, 25 bp, Artificial Sequence
  Description of Artificial Sequence: Synthetic oligonucleotide
tggtctatgatacctgatatgacga

SEQ ID NO: 2361 - DNA, 25 bp, Artificial Sequence
  Description of Artificial Sequence: Synthetic oligonucleotide
ggtctatgatacctgatatgacgat

SEQ ID NO: 2362 - DNA, 25 bp, Artificial Sequence
  Description of Artificial Sequence: Synthetic oligonucleotide
gtctatgatacctgatatgacgatc

SEQ ID NO: 2363 - DNA, 25 bp, Artificial Sequence
  Description of Artificial Sequence: Synthetic oligonucleotide
tctatgatacctgatatgacgatct

SEQ ID NO: 2364 - DNA, 25 bp, Artificial Sequence
  Description of Artificial Sequence: Synthetic oligonucleotide
ctatgatacctgatatgacgatctc

SEQ ID NO: 2365 - DNA, 25 bp, Artificial Sequence
  Description of Artificial Sequence: Synthetic oligonucleotide
tatgatacctgatatgacgatctca

SEQ ID NO: 2366 - DNA, 25 bp, Artificial Sequence
  Description of Artificial Sequence: Synthetic oligonucleotide
atgatacctgatatgacgatctcag

SEQ ID NO: 2367 - DNA, 25 bp, Artificial Sequence
  Description of Artificial Sequence: Synthetic oligonucleotide
tgatacctgatatgacgatctcagg

SEQ ID NO: 2368 - DNA, 25 bp, Artificial Sequence
  Description of Artificial Sequence: Synthetic oligonucleotide
gatacctgatatgacgatctcaggg

SEQ ID NO: 2369 - DNA, 25 bp, Artificial Sequence
  Description of Artificial Sequence: Synthetic oligonucleotide
atacctgatatgacgatctcaggga

SEQ ID NO: 2370 - DNA, 25 bp, Artificial Sequence
  Description of Artificial Sequence: Synthetic oligonucleotide
tacctgatatgacgatctcagggac

SEQ ID NO: 2371 - DNA, 25 bp, Artificial Sequence
  Description of Artificial Sequence: Synthetic oligonucleotide
acctgatatgacgatctcagggaca

SEQ ID NO: 2372 - DNA, 25 bp, Artificial Sequence
  Description of Artificial Sequence: Synthetic oligonucleotide
cctgatatgacgatctcagggacat

SEQ ID NO: 2373 - DNA, 25 bp, Artificial Sequence
  Description of Artificial Sequence: Synthetic oligonucleotide
ctgatatgacgatctcagggacatc

SEQ ID NO: 2374 - DNA, 25 bp, Artificial Sequence
  Description of Artificial Sequence: Synthetic oligonucleotide
tgatatgacgatctcagggacatcc

SEQ ID NO: 2375 - DNA, 25 bp, Artificial Sequence
  Description of Artificial Sequence: Synthetic oligonucleotide
gatatgacgatctcagggacatcca

SEQ ID NO: 2376 - DNA, 25 bp, Artificial Sequence
  Description of Artificial Sequence: Synthetic oligonucleotide
atatgacgatctcagggacatccag

SEQ ID NO: 2377 - DNA, 25 bp, Artificial Sequence
  Description of Artificial Sequence: Synthetic oligonucleotide
tatgacgatctcagggacatccaga

SEQ ID NO: 2378 - DNA, 25 bp, Artificial Sequence
  Description of Artificial Sequence: Synthetic oligonucleotide
atgacgatctcagggacatccagaa

SEQ ID NO: 2379 - DNA, 25 bp, Artificial Sequence
  Description of Artificial Sequence: Synthetic oligonucleotide
tgacgatctcagggacatccagaat

SEQ ID NO: 2380 - DNA, 25 bp, Artificial Sequence
  Description of Artificial Sequence: Synthetic oligonucleotide
gacgatctcagggacatccagaatg

SEQ ID NO: 2381 - DNA, 25 bp, Artificial Sequence
  Description of Artificial Sequence: Synthetic oligonucleotide
acgatctcagggacatccagaatgt

SEQ ID NO: 2382 - DNA, 25 bp, Artificial Sequence
  Description of Artificial Sequence: Synthetic oligonucleotide
cgatctcagggacatccagaatgtt

SEQ ID NO: 2383 - DNA, 25 bp, Artificial Sequence
  Description of Artificial Sequence: Synthetic oligonucleotide
gatctcagggacatccagaatgttg

SEQ ID NO: 2384 - DNA, 25 bp, Artificial Sequence
  Description of Artificial Sequence: Synthetic oligonucleotide
atctcagggacatccagaatgttgc

SEQ ID NO: 2385 - DNA, 25 bp, Artificial Sequence
  Description of Artificial Sequence: Synthetic oligonucleotide
tctcagggacatccagaatgttgcc

SEQ ID NO: 2386 - DNA, 25 bp, Artificial Sequence
  Description of Artificial Sequence: Synthetic oligonucleotide
ctcagggacatccagaatgttgcca

SEQ ID NO: 2387 - DNA, 25 bp, Artificial Sequence
  Description of Artificial Sequence: Synthetic oligonucleotide
tcagggacatccagaatgttgccaa

SEQ ID NO: 2388 - DNA, 25 bp, Artificial Sequence
  Description of Artificial Sequence: Synthetic oligonucleotide
cagggacatccagaatgttgccaaa

SEQ ID NO: 2389 - DNA, 25 bp, Artificial Sequence
  Description of Artificial Sequence: Synthetic oligonucleotide
agggacatccagaatgttgccaaat

SEQ ID NO: 2390 - DNA, 25 bp, Artificial Sequence
  Description of Artificial Sequence: Synthetic oligonucleotide
gggacatccagaatgttgccaaatg

SEQ ID NO: 2391 - DNA, 25 bp, Artificial Sequence
  Description of Artificial Sequence: Synthetic oligonucleotide
ggacatccagaatgttgccaaatga

SEQ ID NO: 2392 - DNA, 25 bp, Artificial Sequence
  Description of Artificial Sequence: Synthetic oligonucleotide
gacatccagaatgttgccaaatgaa

SEQ ID NO: 2393 - DNA, 25 bp, Artificial Sequence
  Description of Artificial Sequence: Synthetic oligonucleotide
acatccagaatgttgccaaatgaag

SEQ ID NO: 2394 - DNA, 25 bp, Artificial Sequence
  Description of Artificial Sequence: Synthetic oligonucleotide
catccagaatgttgccaaatgaagc

SEQ ID NO: 2395 - DNA, 25 bp, Artificial Sequence
  Description of Artificial Sequence: Synthetic oligonucleotide
atccagaatgttgccaaatgaagca

SEQ ID NO: 2396 - DNA, 25 bp, Artificial Sequence
  Description of Artificial Sequence: Synthetic oligonucleotide
tccagaatgttgccaaatgaagcag

SEQ ID NO: 2397 - DNA, 25 bp, Artificial Sequence
  Description of Artificial Sequence: Synthetic oligonucleotide
ccagaatgttgccaaatgaagcagt

SEQ ID NO: 2398 - DNA, 25 bp, Artificial Sequence
  Description of Artificial Sequence: Synthetic oligonucleotide
cagaatgttgccaaatgaagcagtt

SEQ ID NO: 2399 - DNA, 25 bp, Artificial Sequence
  Description of Artificial Sequence: Synthetic oligonucleotide
agaatgttgccaaatgaagcagttt

SEQ ID NO: 2400 - DNA, 25 bp, Artificial Sequence
  Description of Artificial Sequence: Synthetic oligonucleotide
gaatgttgccaaatgaagcagtttt

SEQ ID NO: 2401 - DNA, 25 bp, Artificial Sequence
  Description of Artificial Sequence: Synthetic oligonucleotide
aatgttgccaaatgaagcagtttta

SEQ ID NO: 2402 - DNA, 25 bp, Artificial Sequence
  Description of Artificial Sequence: Synthetic oligonucleotide
atgttgccaaatgaagcagttttac

SEQ ID NO: 2403 - DNA, 25 bp, Artificial Sequence
  Description of Artificial Sequence: Synthetic oligonucleotide
tgttgccaaatgaagcagttttacg

SEQ ID NO: 2404 - DNA, 25 bp, Artificial Sequence
  Description of Artificial Sequence: Synthetic oligonucleotide
gttgccaaatgaagcagttttacgg

SEQ ID NO: 2405 - DNA, 25 bp, Artificial Sequence
  Description of Artificial Sequence: Synthetic oligonucleotide
ttgccaaatgaagcagttttacggt

SEQ ID NO: 2406 - DNA, 25 bp, Artificial Sequence
  Description of Artificial Sequence: Synthetic oligonucleotide
tgccaaatgaagcagttttacggtg

SEQ ID NO: 2407 - DNA, 25 bp, Artificial Sequence
  Description of Artificial Sequence: Synthetic oligonucleotide
gccaaatgaagcagttttacggtgg

SEQ ID NO: 2408 - DNA, 25 bp, Artificial Sequence
  Description of Artificial Sequence: Synthetic oligonucleotide
ccaaatgaagcagttttacggtggc

SEQ ID NO: 2409 - DNA, 25 bp, Artificial Sequence
  Description of Artificial Sequence: Synthetic oligonucleotide
caaatgaagcagttttacggtggcc

SEQ ID NO: 2410 - DNA, 25 bp, Artificial Sequence
  Description of Artificial Sequence: Synthetic oligonucleotide
aaatgaagcagttttacggtggccc

SEQ ID NO: 2411 - DNA, 25 bp, Artificial Sequence
  Description of Artificial Sequence: Synthetic oligonucleotide
aatgaagcagttttacggtggcccc

SEQ ID NO: 2412 - DNA, 25 bp, Artificial Sequence
  Description of Artificial Sequence: Synthetic oligonucleotide
atgaagcagttttacggtggccccg

SEQ ID NO: 2413 - DNA, 25 bp, Artificial Sequence
  Description of Artificial Sequence: Synthetic oligonucleotide
tgaagcagttttacggtggccccgt

SEQ ID NO: 2414 - DNA, 25 bp, Artificial Sequence
  Description of Artificial Sequence: Synthetic oligonucleotide
gaagcagttttacggtggccccgtt

SEQ ID NO: 2415 - DNA, 25 bp, Artificial Sequence
  Description of Artificial Sequence: Synthetic oligonucleotide
aagcagttttacggtggccccgttt

SEQ ID NO: 2416 - DNA, 25 bp, Artificial Sequence
  Description of Artificial Sequence: Synthetic oligonucleotide
agcagttttacggtggccccgttta

SEQ ID NO: 2417 - DNA, 25 bp, Artificial Sequence
  Description of Artificial Sequence: Synthetic oligonucleotide
gcagttttacggtggccccgtttag

SEQ ID NO: 2418 - DNA, 25 bp, Artificial Sequence
  Description of Artificial Sequence: Synthetic oligonucleotide
cagttttacggtggccccgtttagg

SEQ ID NO: 2419 - DNA, 25 bp, Artificial Sequence
  Description of Artificial Sequence: Synthetic oligonucleotide
agttttacggtggccccgtttaggc

SEQ ID NO: 2420 - DNA, 25 bp, Artificial Sequence
  Description of Artificial Sequence: Synthetic oligonucleotide
gttttacggtggccccgtttaggct

SEQ ID NO: 2421 - DNA, 25 bp, Artificial Sequence
  Description of Artificial Sequence: Synthetic oligonucleotide
ttttacggtggccccgtttaggctt

SEQ ID NO: 2422 - DNA, 25 bp, Artificial Sequence
  Description of Artificial Sequence: Synthetic oligonucleotide
tttacggtggccccgtttaggcttg

SEQ ID NO: 2423 - DNA, 25 bp, Artificial Sequence
  Description of Artificial Sequence: Synthetic oligonucleotide
ttacggtggccccgtttaggcttgg

SEQ ID NO: 2424 - DNA, 25 bp, Artificial Sequence
  Description of Artificial Sequence: Synthetic oligonucleotide
tacggtggccccgtttaggcttgga

SEQ ID NO: 2425 - DNA, 25 bp, Artificial Sequence
  Description of Artificial Sequence: Synthetic oligonucleotide
acggtggccccgtttaggcttggaa

SEQ ID NO: 2426 - DNA, 25 bp, Artificial Sequence
  Description of Artificial Sequence: Synthetic oligonucleotide
cggtggccccgtttaggcttggaat

SEQ ID NO: 2427 - DNA, 25 bp, Artificial Sequence
  Description of Artificial Sequence: Synthetic oligonucleotide
ggtggccccgtttaggcttggaata

SEQ ID NO: 2428 - DNA, 25 bp, Artificial Sequence
  Description of Artificial Sequence: Synthetic oligonucleotide
gtggccccgtttaggcttggaatag

SEQ ID NO: 2429 - DNA, 25 bp, Artificial Sequence
  Description of Artificial Sequence: Synthetic oligonucleotide
tggccccgtttaggcttggaatagg

SEQ ID NO: 2430 - DNA, 25 bp, Artificial Sequence
  Description of Artificial Sequence: Synthetic oligonucleotide
ggccccgtttaggcttggaataggc

SEQ ID NO: 2431 - DNA, 25 bp, Artificial Sequence
  Description of Artificial Sequence: Synthetic oligonucleotide
gccccgtttaggcttggaataggct

SEQ ID NO: 2432 - DNA, 25 bp, Artificial Sequence
  Description of Artificial Sequence: Synthetic oligonucleotide
ccccgtttaggcttggaataggctg

SEQ ID NO: 2433 - DNA, 25 bp, Artificial Sequence
  Description of Artificial Sequence: Synthetic oligonucleotide
cccgtttaggcttggaataggctgc

SEQ ID NO: 2434 - DNA, 25 bp, Artificial Sequence
  Description of Artificial Sequence: Synthetic oligonucleotide
ccgtttaggcttggaataggctgca

SEQ ID NO: 2435 - DNA, 25 bp, Artificial Sequence
  Description of Artificial Sequence: Synthetic oligonucleotide
cgtttaggcttggaataggctgcaa

SEQ ID NO: 2436 - DNA, 25 bp, Artificial Sequence
  Description of Artificial Sequence: Synthetic oligonucleotide
gtttaggcttggaataggctgcaaa

SEQ ID NO: 2437 - DNA, 25 bp, Artificial Sequence
  Description of Artificial Sequence: Synthetic oligonucleotide
tttaggcttggaataggctgcaaaa

SEQ ID NO: 2438 - DNA, 25 bp, Artificial Sequence
  Description of Artificial Sequence: Synthetic oligonucleotide
ttaggcttggaataggctgcaaaaa

SEQ ID NO: 2439 - DNA, 25 bp, Artificial Sequence
  Description of Artificial Sequence: Synthetic oligonucleotide
taggcttggaataggctgcaaaaac

SEQ ID NO: 2440 - DNA, 25 bp, Artificial Sequence
  Description of Artificial Sequence: Synthetic oligonucleotide
aggcttggaataggctgcaaaaaca

SEQ ID NO: 2441 - DNA, 25 bp, Artificial Sequence
  Description of Artificial Sequence: Synthetic oligonucleotide
ggcttggaataggctgcaaaaacac

SEQ ID NO: 2442 - DNA, 25 bp, Artificial Sequence
  Description of Artificial Sequence: Synthetic oligonucleotide
gcttggaataggctgcaaaaacaca

SEQ ID NO: 2443 - DNA, 25 bp, Artificial Sequence
  Description of Artificial Sequence: Synthetic oligonucleotide
cttggaataggctgcaaaaacacat

SEQ ID NO: 2444 - DNA, 25 bp, Artificial Sequence
  Description of Artificial Sequence: Synthetic oligonucleotide
ttggaataggctgcaaaaacacata

SEQ ID NO: 2445 - DNA, 25 bp, Artificial Sequence
  Description of Artificial Sequence: Synthetic oligonucleotide
tggaataggctgcaaaaacacatat

SEQ ID NO: 2446 - DNA, 25 bp, Artificial Sequence
  Description of Artificial Sequence: Synthetic oligonucleotide
ggaataggctgcaaaaacacatata

SEQ ID NO: 2447 - DNA, 25 bp, Artificial Sequence
  Description of Artificial Sequence: Synthetic oligonucleotide
gaataggctgcaaaaacacatatat

SEQ ID NO: 2448 - DNA, 25 bp, Artificial Sequence
  Description of Artificial Sequence: Synthetic oligonucleotide
aataggctgcaaaaacacatatata

SEQ ID NO: 2449 - DNA, 25 bp, Artificial Sequence
  Description of Artificial Sequence: Synthetic oligonucleotide
ataggctgcaaaaacacatatatac

SEQ ID NO: 2450 - DNA, 25 bp, Artificial Sequence
  Description of Artificial Sequence: Synthetic oligonucleotide
taggctgcaaaaacacatatataca

SEQ ID NO: 2451 - DNA, 25 bp, Artificial Sequence
  Description of Artificial Sequence: Synthetic oligonucleotide
aggctgcaaaaacacatatatacag

SEQ ID NO: 2452 - DNA, 25 bp, Artificial Sequence
  Description of Artificial Sequence: Synthetic oligonucleotide
ggctgcaaaaacacatatatacagt

SEQ ID NO: 2453 - DNA, 25 bp, Artificial Sequence
  Description of Artificial Sequence: Synthetic oligonucleotide
gctgcaaaaacacatatatacagta

SEQ ID NO: 2454 - DNA, 25 bp, Artificial Sequence
  Description of Artificial Sequence: Synthetic oligonucleotide
ctgcaaaaacacatatatacagtat

SEQ ID NO: 2455 - DNA, 25 bp, Artificial Sequence
  Description of Artificial Sequence: Synthetic oligonucleotide
tgcaaaaacacatatatacagtata

SEQ ID NO: 2456 - DNA, 25 bp, Artificial Sequence
  Description of Artificial Sequence: Synthetic oligonucleotide
gcaaaaacacatatatacagtatac

SEQ ID NO: 2457 - DNA, 25 bp, Artificial Sequence
  Description of Artificial Sequence: Synthetic oligonucleotide
caaaaacacatatatacagtataca

SEQ ID NO: 2458 - DNA, 25 bp, Artificial Sequence
  Description of Artificial Sequence: Synthetic oligonucleotide
aaaaacacatatatacagtatacat

SEQ ID NO: 2459 - DNA, 25 bp, Artificial Sequence
  Description of Artificial Sequence: Synthetic oligonucleotide
aaaacacatatatacagtatacatg

SEQ ID NO: 2460 - DNA, 25 bp, Artificial Sequence
  Description of Artificial Sequence: Synthetic oligonucleotide
aaacacatatatacagtatacatgc

SEQ ID NO: 2461 - DNA, 25 bp, Artificial Sequence
  Description of Artificial Sequence: Synthetic oligonucleotide
aacacatatatacagtatacatgca

SEQ ID NO: 2462 - DNA, 25 bp, Artificial Sequence
  Description of Artificial Sequence: Synthetic oligonucleotide
acacatatatacagtatacatgcaa

SEQ ID NO: 2463 - DNA, 25 bp, Artificial Sequence
  Description of Artificial Sequence: Synthetic oligonucleotide
cacatatatacagtatacatgcaaa

SEQ ID NO: 2464 - DNA, 25 bp, Artificial Sequence
  Description of Artificial Sequence: Synthetic oligonucleotide
acatatatacagtatacatgcaaac

SEQ ID NO: 2465 - DNA, 25 bp, Artificial Sequence
  Description of Artificial Sequence: Synthetic oligonucleotide
catatatacagtatacatgcaaaca

SEQ ID NO: 2466 - DNA, 25 bp, Artificial Sequence
  Description of Artificial Sequence: Synthetic oligonucleotide
atatatacagtatacatgcaaacaa

SEQ ID NO: 2467 - DNA, 25 bp, Artificial Sequence
  Description of Artificial Sequence: Synthetic oligonucleotide
tatatacagtatacatgcaaacaac

SEQ ID NO: 2468 - DNA, 25 bp, Artificial Sequence
  Description of Artificial Sequence: Synthetic oligonucleotide
atatacagtatacatgcaaacaacc

SEQ ID NO: 2469 - DNA, 25 bp, Artificial Sequence
  Description of Artificial Sequence: Synthetic oligonucleotide
tatacagtatacatgcaaacaacca

SEQ ID NO: 2470 - DNA, 25 bp, Artificial Sequence
  Description of Artificial Sequence: Synthetic oligonucleotide
atacagtatacatgcaaacaaccac

SEQ ID NO: 2471 - DNA, 25 bp, Artificial Sequence
  Description of Artificial Sequence: Synthetic oligonucleotide
tacagtatacatgcaaacaaccaca

SEQ ID NO: 2472 - DNA, 25 bp, Artificial Sequence
  Description of Artificial Sequence: Synthetic oligonucleotide
acagtatacatgcaaacaaccacaa

SEQ ID NO: 2473 - DNA, 25 bp, Artificial Sequence
  Description of Artificial Sequence: Synthetic oligonucleotide
cagtatacatgcaaacaaccacaaa

SEQ ID NO: 2474 - DNA, 25 bp, Artificial Sequence
  Description of Artificial Sequence: Synthetic oligonucleotide
agtatacatgcaaacaaccacaaac

SEQ ID NO: 2475 - DNA, 25 bp, Artificial Sequence
  Description of Artificial Sequence: Synthetic oligonucleotide
gtatacatgcaaacaaccacaaaca

SEQ ID NO: 2476 - DNA, 25 bp, Artificial Sequence
  Description of Artificial Sequence: Synthetic oligonucleotide
tatacatgcaaacaaccacaaacag

SEQ ID NO: 2477 - DNA, 25 bp, Artificial Sequence
  Description of Artificial Sequence: Synthetic oligonucleotide
atacatgcaaacaaccacaaacagt

SEQ ID NO: 2478 - DNA, 25 bp, Artificial Sequence
  Description of Artificial Sequence: Synthetic oligonucleotide
tacatgcaaacaaccacaaacagta

SEQ ID NO: 2479 - DNA, 25 bp, Artificial Sequence
  Description of Artificial Sequence: Synthetic oligonucleotide
acatgcaaacaaccacaaacagtaa

SEQ ID NO: 2480 - DNA, 25 bp, Artificial Sequence
  Description of Artificial Sequence: Synthetic oligonucleotide
acacatgccaaactaacaatggaaa

SEQ ID NO: 2481 - DNA, 25 bp, Artificial Sequence
  Description of Artificial Sequence: Synthetic oligonucleotide
cacatgccaaactaacaatggaaag

SEQ ID NO: 2482 - DNA, 25 bp, Artificial Sequence
  Description of Artificial Sequence: Synthetic oligonucleotide
acatgccaaactaacaatggaaagg

SEQ ID NO: 2483 - DNA, 25 bp, Artificial Sequence
  Description of Artificial Sequence: Synthetic oligonucleotide
catgccaaactaacaatggaaagga

SEQ ID NO: 2484 - DNA, 25 bp, Artificial Sequence
  Description of Artificial Sequence: Synthetic oligonucleotide
atgccaaactaacaatggaaaggag

SEQ ID NO: 2485 - DNA, 25 bp, Artificial Sequence
  Description of Artificial Sequence: Synthetic oligonucleotide
tgccaaactaacaatggaaaggagg

SEQ ID NO: 2486 - DNA, 25 bp, Artificial Sequence
  Description of Artificial Sequence: Synthetic oligonucleotide
gccaaactaacaatggaaaggagga

SEQ ID NO: 2487 - DNA, 25 bp, Artificial Sequence
  Description of Artificial Sequence: Synthetic oligonucleotide
ccaaactaacaatggaaaggaggag

SEQ ID NO: 2488 - DNA, 25 bp, Artificial Sequence
  Description of Artificial Sequence: Synthetic oligonucleotide
caaactaacaatggaaaggaggagg

SEQ ID NO: 2489 - DNA, 25 bp, Artificial Sequence
  Description of Artificial Sequence: Synthetic oligonucleotide
aaactaacaatggaaaggaggaggg

SEQ ID NO: 2490 - DNA, 25 bp, Artificial Sequence
  Description of Artificial Sequence: Synthetic oligonucleotide
aactaacaatggaaaggaggagggt

SEQ ID NO: 2491 - DNA, 25 bp, Artificial Sequence
  Description of Artificial Sequence: Synthetic oligonucleotide
actaacaatggaaaggaggagggta

SEQ ID NO: 2492 - DNA, 25 bp, Artificial Sequence
  Description of Artificial Sequence: Synthetic oligonucleotide
ctaacaatggaaaggaggagggtaa

SEQ ID NO: 2493 - DNA, 25 bp, Artificial Sequence
  Description of Artificial Sequence: Synthetic oligonucleotide
taacaatggaaaggaggagggtaag

SEQ ID NO: 2494 - DNA, 25 bp, Artificial Sequence
  Description of Artificial Sequence: Synthetic oligonucleotide
aacaatggaaaggaggagggtaagt

SEQ ID NO: 2495 - DNA, 25 bp, Artificial Sequence
  Description of Artificial Sequence: Synthetic oligonucleotide
acaatggaaaggaggagggtaagtg

SEQ ID NO: 2496 - DNA, 25 bp, Artificial Sequence
  Description of Artificial Sequence: Synthetic oligonucleotide
caatggaaaggaggagggtaagtgc

SEQ ID NO: 2497 - DNA, 25 bp, Artificial Sequence
  Description of Artificial Sequence: Synthetic oligonucleotide
aatggaaaggaggagggtaagtgca

SEQ ID NO: 2498 - DNA, 25 bp, Artificial Sequence
  Description of Artificial Sequence: Synthetic oligonucleotide
atggaaaggaggagggtaagtgcaa

SEQ ID NO: 2499 - DNA, 25 bp, Artificial Sequence
  Description of Artificial Sequence: Synthetic oligonucleotide
tggaaaggaggagggtaagtgcaaa

SEQ ID NO: 2500 - DNA, 25 bp, Artificial Sequence
  Description of Artificial Sequence: Synthetic oligonucleotide
ggaaaggaggagggtaagtgcaaat

SEQ ID NO: 2501 - DNA, 25 bp, Artificial Sequence
  Description of Artificial Sequence: Synthetic oligonucleotide
gaaaggaggagggtaagtgcaaata

SEQ ID NO: 2502 - DNA, 25 bp, Artificial Sequence
  Description of Artificial Sequence: Synthetic oligonucleotide
aaaggaggagggtaagtgcaaatat

SEQ ID NO: 2503 - DNA, 25 bp, Artificial Sequence
  Description of Artificial Sequence: Synthetic oligonucleotide
aaggaggagggtaagtgcaaatata

SEQ ID NO: 2504 - DNA, 25 bp, Artificial Sequence
  Description of Artificial Sequence: Synthetic oligonucleotide
aggaggagggtaagtgcaaatatat

SEQ ID NO: 2505 - DNA, 25 bp, Artificial Sequence
  Description of Artificial Sequence: Synthetic oligonucleotide
ggaggagggtaagtgcaaatatata

SEQ ID NO: 2506 - DNA, 25 bp, Artificial Sequence
  Description of Artificial Sequence: Synthetic oligonucleotide
gaggagggtaagtgcaaatatatac

SEQ ID NO: 2507 - DNA, 25 bp, Artificial Sequence
  Description of Artificial Sequence: Synthetic oligonucleotide
aggagggtaagtgcaaatatatacc

SEQ ID NO: 2508 - DNA, 25 bp, Artificial Sequence
  Description of Artificial Sequence: Synthetic oligonucleotide
ggagggtaagtgcaaatatatacct

SEQ ID NO: 2509 - DNA, 25 bp, Artificial Sequence
  Description of Artificial Sequence: Synthetic oligonucleotide
gagggtaagtgcaaatatatacctg

SEQ ID NO: 2510 - DNA, 25 bp, Artificial Sequence
  Description of Artificial Sequence: Synthetic oligonucleotide
agggtaagtgcaaatatatacctgt

SEQ ID NO: 2511 - DNA, 25 bp, Artificial Sequence
  Description of Artificial Sequence: Synthetic oligonucleotide
gggtaagtgcaaatatatacctgtt

SEQ ID NO: 2512 - DNA, 25 bp, Artificial Sequence
  Description of Artificial Sequence: Synthetic oligonucleotide
ggtaagtgcaaatatatacctgttg

SEQ ID NO: 2513 - DNA, 25 bp, Artificial Sequence
  Description of Artificial Sequence: Synthetic oligonucleotide
gtaagtgcaaatatatacctgttgg

SEQ ID NO: 2514 - DNA, 25 bp, Artificial Sequence
  Description of Artificial Sequence: Synthetic oligonucleotide
taagtgcaaatatatacctgttggt

SEQ ID NO: 2515 - DNA, 25 bp, Artificial Sequence
  Description of Artificial Sequence: Synthetic oligonucleotide
aagtgcaaatatatacctgttggtg

SEQ ID NO: 2516 - DNA, 25 bp, Artificial Sequence
  Description of Artificial Sequence: Synthetic oligonucleotide
agtgcaaatatatacctgttggtgt

SEQ ID NO: 2517 - DNA, 25 bp, Artificial Sequence
  Description of Artificial Sequence: Synthetic oligonucleotide
gtgcaaatatatacctgttggtgtg

SEQ ID NO: 2518 - DNA, 25 bp, Artificial Sequence
  Description of Artificial Sequence: Synthetic oligonucleotide
tgcaaatatatacctgttggtgtga

SEQ ID NO: 2519 - DNA, 25 bp, Artificial Sequence
  Description of Artificial Sequence: Synthetic oligonucleotide
gcaaatatatacctgttggtgtgaa

SEQ ID NO: 2520 - DNA, 25 bp, Artificial Sequence
  Description of Artificial Sequence: Synthetic oligonucleotide
caaatatatacctgttggtgtgaag

SEQ ID NO: 2521 - DNA, 25 bp, Artificial Sequence
  Description of Artificial Sequence: Synthetic oligonucleotide
aaatatatacctgttggtgtgaagg

SEQ ID NO: 2522 - DNA, 25 bp, Artificial Sequence
  Description of Artificial Sequence: Synthetic oligonucleotide
aatatatacctgttggtgtgaaggt

SEQ ID NO: 2523 - DNA, 25 bp, Artificial Sequence
  Description of Artificial Sequence: Synthetic oligonucleotide
atatatacctgttggtgtgaaggta

SEQ ID NO: 2524 - DNA, 25 bp, Artificial Sequence
  Description of Artificial Sequence: Synthetic oligonucleotide
tatatacctgttggtgtgaaggtaa

SEQ ID NO: 2525 - DNA, 25 bp, Artificial Sequence
  Description of Artificial Sequence: Synthetic oligonucleotide
atatacctgttggtgtgaaggtaaa

SEQ ID NO: 2526 - DNA, 25 bp, Artificial Sequence
  Description of Artificial Sequence: Synthetic oligonucleotide
tatacctgttggtgtgaaggtaaaa

SEQ ID NO: 2527 - DNA, 25 bp, Artificial Sequence
  Description of Artificial Sequence: Synthetic oligonucleotide
atacctgttggtgtgaaggtaaaag

SEQ ID NO: 2528 - DNA, 25 bp, Artificial Sequence
  Description of Artificial Sequence: Synthetic oligonucleotide
tacctgttggtgtgaaggtaaaaga

SEQ ID NO: 2529 - DNA, 25 bp, Artificial Sequence
  Description of Artificial Sequence: Synthetic oligonucleotide
acctgttggtgtgaaggtaaaagac

SEQ ID NO: 2530 - DNA, 25 bp, Artificial Sequence
  Description of Artificial Sequence: Synthetic oligonucleotide
cctgttggtgtgaaggtaaaagacg

SEQ ID NO: 2531 - DNA, 25 bp, Artificial Sequence
  Description of Artificial Sequence: Synthetic oligonucleotide
ctgttggtgtgaaggtaaaagacgg

SEQ ID NO: 2532 - DNA, 25 bp, Artificial Sequence
  Description of Artificial Sequence: Synthetic oligonucleotide
tgttggtgtgaaggtaaaagacggg

SEQ ID NO: 2533 - DNA, 25 bp, Artificial Sequence
  Description of Artificial Sequence: Synthetic oligonucleotide
gttggtgtgaaggtaaaagacggga

SEQ ID NO: 2534 - DNA, 25 bp, Artificial Sequence
  Description of Artificial Sequence: Synthetic oligonucleotide
ttggtgtgaaggtaaaagacgggac

SEQ ID NO: 2535 - DNA, 25 bp, Artificial Sequence
  Description of Artificial Sequence: Synthetic oligonucleotide
tggtgtgaaggtaaaagacgggact

SEQ ID NO: 2536 - DNA, 25 bp, Artificial Sequence
  Description of Artificial Sequence: Synthetic oligonucleotide
ggtgtgaaggtaaaagacgggactg

SEQ ID NO: 2537 - DNA, 25 bp, Artificial Sequence
  Description of Artificial Sequence: Synthetic oligonucleotide
gtgtgaaggtaaaagacgggactga

SEQ ID NO: 2538 - DNA, 25 bp, Artificial Sequence
  Description of Artificial Sequence: Synthetic oligonucleotide
tgtgaaggtaaaagacgggactgaa

SEQ ID NO: 2539 - DNA, 25 bp, Artificial Sequence
  Description of Artificial Sequence: Synthetic oligonucleotide
gtgaaggtaaaagacgggactgaaa

SEQ ID NO: 2540 - DNA, 25 bp, Artificial Sequence
  Description of Artificial Sequence: Synthetic oligonucleotide
tgaaggtaaaagacgggactgaaaa

SEQ ID NO: 2541 - DNA, 25 bp, Artificial Sequence
  Description of Artificial Sequence: Synthetic oligonucleotide
gaaggtaaaagacgggactgaaaaa

SEQ ID NO: 2542 - DNA, 25 bp, Artificial Sequence
  Description of Artificial Sequence: Synthetic oligonucleotide
aaggtaaaagacgggactgaaaaat

SEQ ID NO: 2543 - DNA, 25 bp, Artificial Sequence
  Description of Artificial Sequence: Synthetic oligonucleotide
aggtaaaagacgggactgaaaaatc

SEQ ID NO: 2544 - DNA, 25 bp, Artificial Sequence
  Description of Artificial Sequence: Synthetic oligonucleotide
ggtaaaagacgggactgaaaaatca

SEQ ID NO: 2545 - DNA, 25 bp, Artificial Sequence
  Description of Artificial Sequence: Synthetic oligonucleotide
gtaaaagacgggactgaaaaatcaa

SEQ ID NO: 2546 - DNA, 25 bp, Artificial Sequence
  Description of Artificial Sequence: Synthetic oligonucleotide
taaaagacgggactgaaaaatcaaa

SEQ ID NO: 2547 - DNA, 25 bp, Artificial Sequence
  Description of Artificial Sequence: Synthetic oligonucleotide
aaaagacgggactgaaaaatcaaaa

SEQ ID NO: 2548 - DNA, 25 bp, Artificial Sequence
  Description of Artificial Sequence: Synthetic oligonucleotide
aaagacgggactgaaaaatcaaaac

SEQ ID NO: 2549 - DNA, 25 bp, Artificial Sequence
  Description of Artificial Sequence: Synthetic oligonucleotide
aagacgggactgaaaaatcaaaaca

SEQ ID NO: 2550 - DNA, 25 bp, Artificial Sequence
  Description of Artificial Sequence: Synthetic oligonucleotide
agacgggactgaaaaatcaaaacaa

SEQ ID NO: 2551 - DNA, 25 bp, Artificial Sequence
  Description of Artificial Sequence: Synthetic oligonucleotide
gacgggactgaaaaatcaaaacaaa

SEQ ID NO: 2552 - DNA, 25 bp, Artificial Sequence
  Description of Artificial Sequence: Synthetic oligonucleotide
acgggactgaaaaatcaaaacaaaa

SEQ ID NO: 2553 - DNA, 25 bp, Artificial Sequence
  Description of Artificial Sequence: Synthetic oligonucleotide
cgggactgaaaaatcaaaacaaaat

SEQ ID NO: 2554 - DNA, 25 bp, Artificial Sequence
  Description of Artificial Sequence: Synthetic oligonucleotide
gggactgaaaaatcaaaacaaaata

SEQ ID NO: 2555 - DNA, 25 bp, Artificial Sequence
  Description of Artificial Sequence: Synthetic oligonucleotide
ggactgaaaaatcaaaacaaaatat

SEQ ID NO: 2556 - DNA, 25 bp, Artificial Sequence
  Description of Artificial Sequence: Synthetic oligonucleotide
gactgaaaaatcaaaacaaaatata

SEQ ID NO: 2557 - DNA, 25 bp, Artificial Sequence
  Description of Artificial Sequence: Synthetic oligonucleotide
actgaaaaatcaaaacaaaatataa

SEQ ID NO: 2558 - DNA, 25 bp, Artificial Sequence
  Description of Artificial Sequence: Synthetic oligonucleotide
ctgaaaaatcaaaacaaaatataaa

SEQ ID NO: 2559 - DNA, 25 bp, Artificial Sequence
  Description of Artificial Sequence: Synthetic oligonucleotide
tgaaaaatcaaaacaaaatataaac

SEQ ID NO: 2560 - DNA, 25 bp, Artificial Sequence
  Description of Artificial Sequence: Synthetic oligonucleotide
gaaaaatcaaaacaaaatataaacc

SEQ ID NO: 2561 - DNA, 25 bp, Artificial Sequence
  Description of Artificial Sequence: Synthetic oligonucleotide
aaaaatcaaaacaaaatataaacca

SEQ ID NO: 2562 - DNA, 25 bp, Artificial Sequence
  Description of Artificial Sequence: Synthetic oligonucleotide
aaaatcaaaacaaaatataaaccag

SEQ ID NO: 2563 - DNA, 25 bp, Artificial Sequence
  Description of Artificial Sequence: Synthetic oligonucleotide
aaatcaaaacaaaatataaaccagt

SEQ ID NO: 2564 - DNA, 25 bp, Artificial Sequence
  Description of Artificial Sequence: Synthetic oligonucleotide
aatcaaaacaaaatataaaccagtt

SEQ ID NO: 2565 - DNA, 25 bp, Artificial Sequence
  Description of Artificial Sequence: Synthetic oligonucleotide
atcaaaacaaaatataaaccagtta

SEQ ID NO: 2566 - DNA, 25 bp, Artificial Sequence
  Description of Artificial Sequence: Synthetic oligonucleotide
tcaaaacaaaatataaaccagttat

SEQ ID NO: 2567 - DNA, 25 bp, Artificial Sequence
  Description of Artificial Sequence: Synthetic oligonucleotide
caaaacaaaatataaaccagttatt

SEQ ID NO: 2568 - DNA, 25 bp, Artificial Sequence
  Description of Artificial Sequence: Synthetic oligonucleotide
aaaacaaaatataaaccagttatta

SEQ ID NO: 2569 - DNA, 25 bp, Artificial Sequence
  Description of Artificial Sequence: Synthetic oligonucleotide
aaacaaaatataaaccagttattaa

SEQ ID NO: 2570 - DNA, 25 bp, Artificial Sequence
  Description of Artificial Sequence: Synthetic oligonucleotide
aacaaaatataaaccagttattaag

SEQ ID NO: 2571 - DNA, 25 bp, Artificial Sequence
  Description of Artificial Sequence: Synthetic oligonucleotide
acaaaatataaaccagttattaagc

SEQ ID NO: 2572 - DNA, 25 bp, Artificial Sequence
  Description of Artificial Sequence: Synthetic oligonucleotide
caaaatataaaccagttattaagct

SEQ ID NO: 2573 - DNA, 25 bp, Artificial Sequence
  Description of Artificial Sequence: Synthetic oligonucleotide
aaaatataaaccagttattaagctg

SEQ ID NO: 2574 - DNA, 25 bp, Artificial Sequence
  Description of Artificial Sequence: Synthetic oligonucleotide
aaatataaaccagttattaagctga

SEQ ID NO: 2575 - DNA, 25 bp, Artificial Sequence
  Description of Artificial Sequence: Synthetic oligonucleotide
aatataaaccagttattaagctgaa

SEQ ID NO: 2576 - DNA, 25 bp, Artificial Sequence
  Description of Artificial Sequence: Synthetic oligonucleotide
atataaaccagttattaagctgaag

SEQ ID NO: 2577 - DNA, 25 bp, Artificial Sequence
  Description of Artificial Sequence: Synthetic oligonucleotide
tataaaccagttattaagctgaaga

SEQ ID NO: 2578 - DNA, 25 bp, Artificial Sequence
  Description of Artificial Sequence: Synthetic oligonucleotide
ataaaccagttattaagctgaagag

SEQ ID NO: 2579 - DNA, 25 bp, Artificial Sequence
  Description of Artificial Sequence: Synthetic oligonucleotide
taaaccagttattaagctgaagaga

SEQ ID NO: 2580 - DNA, 25 bp, Artificial Sequence
  Description of Artificial Sequence: Synthetic oligonucleotide
aaaccagttattaagctgaagagag

SEQ ID NO: 2581 - DNA, 25 bp, Artificial Sequence
  Description of Artificial Sequence: Synthetic oligonucleotide
aaccagttattaagctgaagagaga

SEQ ID NO: 2582 - DNA, 25 bp, Artificial Sequence
  Description of Artificial Sequence: Synthetic oligonucleotide
accagttattaagctgaagagagaa

SEQ ID NO: 2583 - DNA, 25 bp, Artificial Sequence
  Description of Artificial Sequence: Synthetic oligonucleotide
ccagttattaagctgaagagagaaa

SEQ ID NO: 2584 - DNA, 25 bp, Artificial Sequence
  Description of Artificial Sequence: Synthetic oligonucleotide
tttatgtaggaaacagcagttaaaa

SEQ ID NO: 2585 - DNA, 25 bp, Artificial Sequence
  Description of Artificial Sequence: Synthetic oligonucleotide
ttatgtaggaaacagcagttaaaac

SEQ ID NO: 2586 - DNA, 25 bp, Artificial Sequence
  Description of Artificial Sequence: Synthetic oligonucleotide
tatgtaggaaacagcagttaaaacg

SEQ ID NO: 2587 - DNA, 25 bp, Artificial Sequence
  Description of Artificial Sequence: Synthetic oligonucleotide
atgtaggaaacagcagttaaaacgt

SEQ ID NO: 2588 - DNA, 25 bp, Artificial Sequence
  Description of Artificial Sequence: Synthetic oligonucleotide
tgtaggaaacagcagttaaaacgtt

SEQ ID NO: 2589 - DNA, 25 bp, Artificial Sequence
  Description of Artificial Sequence: Synthetic oligonucleotide
gtaggaaacagcagttaaaacgttg

SEQ ID NO: 2590 - DNA, 25 bp, Artificial Sequence
  Description of Artificial Sequence: Synthetic oligonucleotide
taggaaacagcagttaaaacgttga

SEQ ID NO: 2591 - DNA, 25 bp, Artificial Sequence
  Description of Artificial Sequence: Synthetic oligonucleotide
aggaaacagcagttaaaacgttgaa

SEQ ID NO: 2592 - DNA, 25 bp, Artificial Sequence
  Description of Artificial Sequence: Synthetic oligonucleotide
ggaaacagcagttaaaacgttgaat

SEQ ID NO: 2593 - DNA, 25 bp, Artificial Sequence
  Description of Artificial Sequence: Synthetic oligonucleotide
gaaacagcagttaaaacgttgaatc

SEQ ID NO: 2594 - DNA, 25 bp, Artificial Sequence
  Description of Artificial Sequence: Synthetic oligonucleotide
aaacagcagttaaaacgttgaatca

SEQ ID NO: 2595 - DNA, 25 bp, Artificial Sequence
  Description of Artificial Sequence: Synthetic oligonucleotide
aacagcagttaaaacgttgaatcag

SEQ ID NO: 2596 - DNA, 25 bp, Artificial Sequence
  Description of Artificial Sequence: Synthetic oligonucleotide
acagcagttaaaacgttgaatcaga

SEQ ID NO: 2597 - DNA, 25 bp, Artificial Sequence
  Description of Artificial Sequence: Synthetic oligonucleotide
cagcagttaaaacgttgaatcagaa

SEQ ID NO: 2598 - DNA, 25 bp, Artificial Sequence
  Description of Artificial Sequence: Synthetic oligonucleotide
agcagttaaaacgttgaatcagaaa

SEQ ID NO: 2599 - DNA, 25 bp, Artificial Sequence
  Description of Artificial Sequence: Synthetic oligonucleotide
gcagttaaaacgttgaatcagaaat

SEQ ID NO: 2600 - DNA, 25 bp, Artificial Sequence
  Description of Artificial Sequence: Synthetic oligonucleotide
cagttaaaacgttgaatcagaaatg

SEQ ID NO: 2601 - DNA, 25 bp, Artificial Sequence
  Description of Artificial Sequence: Synthetic oligonucleotide
agttaaaacgttgaatcagaaatgg

SEQ ID NO: 2602 - DNA, 25 bp, Artificial Sequence
  Description of Artificial Sequence: Synthetic oligonucleotide
gttaaaacgttgaatcagaaatggt

SEQ ID NO: 2603 - DNA, 25 bp, Artificial Sequence
  Description of Artificial Sequence: Synthetic oligonucleotide
ttaaaacgttgaatcagaaatggtt

SEQ ID NO: 2604 - DNA, 25 bp, Artificial Sequence
  Description of Artificial Sequence: Synthetic oligonucleotide
taaaacgttgaatcagaaatggtta

SEQ ID NO: 2605 - DNA, 25 bp, Artificial Sequence
  Description of Artificial Sequence: Synthetic oligonucleotide
aaaacgttgaatcagaaatggttaa

SEQ ID NO: 2606 - DNA, 25 bp, Artificial Sequence
  Description of Artificial Sequence: Synthetic oligonucleotide
aaacgttgaatcagaaatggttaag

SEQ ID NO: 2607 - DNA, 25 bp, Artificial Sequence
  Description of Artificial Sequence: Synthetic oligonucleotide
aacgttgaatcagaaatggttaagt

SEQ ID NO: 2608 - DNA, 25 bp, Artificial Sequence
  Description of Artificial Sequence: Synthetic oligonucleotide
acgttgaatcagaaatggttaagtc

SEQ ID NO: 2609 - DNA, 25 bp, Artificial Sequence
  Description of Artificial Sequence: Synthetic oligonucleotide
cgttgaatcagaaatggttaagtca

SEQ ID NO: 2610 - DNA, 25 bp, Artificial Sequence
  Description of Artificial Sequence: Synthetic oligonucleotide
gttgaatcagaaatggttaagtcac

SEQ ID NO: 2611 - DNA, 25 bp, Artificial Sequence
  Description of Artificial Sequence: Synthetic oligonucleotide
ttgaatcagaaatggttaagtcact

SEQ ID NO: 2612 - DNA, 25 bp, Artificial Sequence
  Description of Artificial Sequence: Synthetic oligonucleotide
tgaatcagaaatggttaagtcactt

SEQ ID NO: 2613 - DNA, 25 bp, Artificial Sequence
  Description of Artificial Sequence: Synthetic oligonucleotide
gaatcagaaatggttaagtcacttg

SEQ ID NO: 2614 - DNA, 25 bp, Artificial Sequence
  Description of Artificial Sequence: Synthetic oligonucleotide
aatcagaaatggttaagtcacttgg

SEQ ID NO: 2615 - DNA, 25 bp, Artificial Sequence
  Description of Artificial Sequence: Synthetic oligonucleotide
atcagaaatggttaagtcacttggg

SEQ ID NO: 2616 - DNA, 25 bp, Artificial Sequence
  Description of Artificial Sequence: Synthetic oligonucleotide
tcagaaatggttaagtcacttgggt

SEQ ID NO: 2617 - DNA, 25 bp, Artificial Sequence
  Description of Artificial Sequence: Synthetic oligonucleotide
cagaaatggttaagtcacttgggtg

SEQ ID NO: 2618 - DNA, 25 bp, Artificial Sequence
  Description of Artificial Sequence: Synthetic oligonucleotide
agaaatggttaagtcacttgggtga

SEQ ID NO: 2619 - DNA, 25 bp, Artificial Sequence
  Description of Artificial Sequence: Synthetic oligonucleotide
gaaatggttaagtcacttgggtgag

SEQ ID NO: 2620 - DNA, 25 bp, Artificial Sequence
  Description of Artificial Sequence: Synthetic oligonucleotide
aaatggttaagtcacttgggtgaga

SEQ ID NO: 2621 - DNA, 25 bp, Artificial Sequence
  Description of Artificial Sequence: Synthetic oligonucleotide
aatggttaagtcacttgggtgagag

SEQ ID NO: 2622 - DNA, 25 bp, Artificial Sequence
  Description of Artificial Sequence: Synthetic oligonucleotide
atggttaagtcacttgggtgagaga

SEQ ID NO: 2623 - DNA, 25 bp, Artificial Sequence
  Description of Artificial Sequence: Synthetic oligonucleotide
tggttaagtcacttgggtgagagat

SEQ ID NO: 2624 - DNA, 25 bp, Artificial Sequence
  Description of Artificial Sequence: Synthetic oligonucleotide
ggttaagtcacttgggtgagagatc

SEQ ID NO: 2625 - DNA, 25 bp, Artificial Sequence
  Description of Artificial Sequence: Synthetic oligonucleotide
gttaagtcacttgggtgagagatca

SEQ ID NO: 2626 - DNA, 25 bp, Artificial Sequence
  Description of Artificial Sequence: Synthetic oligonucleotide
ttaagtcacttgggtgagagatcat

SEQ ID NO: 2627 - DNA, 25 bp, Artificial Sequence
  Description of Artificial Sequence: Synthetic oligonucleotide
taagtcacttgggtgagagatcatc

SEQ ID NO: 2628 - DNA, 25 bp, Artificial Sequence
  Description of Artificial Sequence: Synthetic oligonucleotide
aagtcacttgggtgagagatcatcc

SEQ ID NO: 2629 - DNA, 25 bp, Artificial Sequence
  Description of Artificial Sequence: Synthetic oligonucleotide
agtcacttgggtgagagatcatcca

SEQ ID NO: 2630 - DNA, 25 bp, Artificial Sequence
  Description of Artificial Sequence: Synthetic oligonucleotide
gtcacttgggtgagagatcatccat

SEQ ID NO: 2631 - DNA, 25 bp, Artificial Sequence
  Description of Artificial Sequence: Synthetic oligonucleotide
tcacttgggtgagagatcatccatc

SEQ ID NO: 2632 - DNA, 25 bp, Artificial Sequence
  Description of Artificial Sequence: Synthetic oligonucleotide
cacttgggtgagagatcatccatca

SEQ ID NO: 2633 - DNA, 25 bp, Artificial Sequence
  Description of Artificial Sequence: Synthetic oligonucleotide
acttgggtgagagatcatccatcaa

SEQ ID NO: 2634 - DNA, 25 bp, Artificial Sequence
  Description of Artificial Sequence: Synthetic oligonucleotide
cttgggtgagagatcatccatcaag

SEQ ID NO: 2635 - DNA, 25 bp, Artificial Sequence
  Description of Artificial Sequence: Synthetic oligonucleotide
ttgggtgagagatcatccatcaaga

SEQ ID NO: 2636 - DNA, 25 bp, Artificial Sequence
  Description of Artificial Sequence: Synthetic oligonucleotide
tgggtgagagatcatccatcaagat

SEQ ID NO: 2637 - DNA, 25 bp, Artificial Sequence
  Description of Artificial Sequence: Synthetic oligonucleotide
gggtgagagatcatccatcaagatg

SEQ ID NO: 2638 - DNA, 25 bp, Artificial Sequence
  Description of Artificial Sequence: Synthetic oligonucleotide
ggtgagagatcatccatcaagatga

SEQ ID NO: 2639 - DNA, 25 bp, Artificial Sequence
  Description of Artificial Sequence: Synthetic oligonucleotide
gtgagagatcatccatcaagatgaa

SEQ ID NO: 2640 - DNA, 25 bp, Artificial Sequence
  Description of Artificial Sequence: Synthetic oligonucleotide
tgagagatcatccatcaagatgaac

SEQ ID NO: 2641 - DNA, 25 bp, Artificial Sequence
  Description of Artificial Sequence: Synthetic oligonucleotide
gagagatcatccatcaagatgaacg

SEQ ID NO: 2642 - DNA, 25 bp, Artificial Sequence
  Description of Artificial Sequence: Synthetic oligonucleotide
agagatcatccatcaagatgaacga

SEQ ID NO: 2643 - DNA, 25 bp, Artificial Sequence
  Description of Artificial Sequence: Synthetic oligonucleotide
gagatcatccatcaagatgaacgaa

SEQ ID NO: 2644 - DNA, 25 bp, Artificial Sequence
  Description of Artificial Sequence: Synthetic oligonucleotide
agatcatccatcaagatgaacgaag

SEQ ID NO: 2645 - DNA, 25 bp, Artificial Sequence
  Description of Artificial Sequence: Synthetic oligonucleotide
gatcatccatcaagatgaacgaaga

SEQ ID NO: 2646 - DNA, 25 bp, Artificial Sequence
  Description of Artificial Sequence: Synthetic oligonucleotide
atcatccatcaagatgaacgaagag

SEQ ID NO: 2647 - DNA, 25 bp, Artificial Sequence
  Description of Artificial Sequence: Synthetic oligonucleotide
tcatccatcaagatgaacgaagagc

SEQ ID NO: 2648 - DNA, 25 bp, Artificial Sequence
  Description of Artificial Sequence: Synthetic oligonucleotide
catccatcaagatgaacgaagagca

SEQ ID NO: 2649 - DNA, 25 bp, Artificial Sequence
  Description of Artificial Sequence: Synthetic oligonucleotide
atccatcaagatgaacgaagagcat

SEQ ID NO: 2650 - DNA, 25 bp, Artificial Sequence
  Description of Artificial Sequence: Synthetic oligonucleotide
tccatcaagatgaacgaagagcatg

SEQ ID NO: 2651 - DNA, 25 bp, Artificial Sequence
  Description of Artificial Sequence: Synthetic oligonucleotide
ccatcaagatgaacgaagagcatga

SEQ ID NO: 2652 - DNA, 25 bp, Artificial Sequence
  Description of Artificial Sequence: Synthetic oligonucleotide
catcaagatgaacgaagagcatgaa

SEQ ID NO: 2653 - DNA, 25 bp, Artificial Sequence
  Description of Artificial Sequence: Synthetic oligonucleotide
atcaagatgaacgaagagcatgaat

SEQ ID NO: 2654 - DNA, 25 bp, Artificial Sequence
  Description of Artificial Sequence: Synthetic oligonucleotide
tcaagatgaacgaagagcatgaatt

SEQ ID NO: 2655 - DNA, 25 bp, Artificial Sequence
  Description of Artificial Sequence: Synthetic oligonucleotide
caagatgaacgaagagcatgaattg

SEQ ID NO: 2656 - DNA, 25 bp, Artificial Sequence
  Description of Artificial Sequence: Synthetic oligonucleotide
aagatgaacgaagagcatgaattgg

SEQ ID NO: 2657 - DNA, 25 bp, Artificial Sequence
  Description of Artificial Sequence: Synthetic oligonucleotide
agatgaacgaagagcatgaattgga

SEQ ID NO: 2658 - DNA, 25 bp, Artificial Sequence
  Description of Artificial Sequence: Synthetic oligonucleotide
gatgaacgaagagcatgaattggag

SEQ ID NO: 2659 - DNA, 25 bp, Artificial Sequence
  Description of Artificial Sequence: Synthetic oligonucleotide
atgaacgaagagcatgaattggagc

SEQ ID NO: 2660 - DNA, 25 bp, Artificial Sequence
  Description of Artificial Sequence: Synthetic oligonucleotide
tgaacgaagagcatgaattggagca

SEQ ID NO: 2661 - DNA, 25 bp, Artificial Sequence
  Description of Artificial Sequence: Synthetic oligonucleotide
gaacgaagagcatgaattggagcat

SEQ ID NO: 2662 - DNA, 25 bp, Artificial Sequence
  Description of Artificial Sequence: Synthetic oligonucleotide
aacgaagagcatgaattggagcatg

SEQ ID NO: 2663 - DNA, 25 bp, Artificial Sequence
  Description of Artificial Sequence: Synthetic oligonucleotide
acgaagagcatgaattggagcatgc

SEQ ID NO: 2664 - DNA, 25 bp, Artificial Sequence
  Description of Artificial Sequence: Synthetic oligonucleotide
cgaagagcatgaattggagcatgct

SEQ ID NO: 2665 - DNA, 25 bp, Artificial Sequence
  Description of Artificial Sequence: Synthetic oligonucleotide
gaagagcatgaattggagcatgcta

SEQ ID NO: 2666 - DNA, 25 bp, Artificial Sequence
  Description of Artificial Sequence: Synthetic oligonucleotide
aagagcatgaattggagcatgctac

SEQ ID NO: 2667 - DNA, 25 bp, Artificial Sequence
  Description of Artificial Sequence: Synthetic oligonucleotide
agagcatgaattggagcatgctact

SEQ ID NO: 2668 - DNA, 25 bp, Artificial Sequence
  Description of Artificial Sequence: Synthetic oligonucleotide
gagcatgaattggagcatgctactg

SEQ ID NO: 2669 - DNA, 25 bp, Artificial Sequence
  Description of Artificial Sequence: Synthetic oligonucleotide
agcatgaattggagcatgctactgg

SEQ ID NO: 2670 - DNA, 25 bp, Artificial Sequence
  Description of Artificial Sequence: Synthetic oligonucleotide
gcatgaattggagcatgctactgga

SEQ ID NO: 2671 - DNA, 25 bp, Artificial Sequence
  Description of Artificial Sequence: Synthetic oligonucleotide
catgaattggagcatgctactggag

SEQ ID NO: 2672 - DNA, 25 bp, Artificial Sequence
  Description of Artificial Sequence: Synthetic oligonucleotide
atgaattggagcatgctactggaga

SEQ ID NO: 2673 - DNA, 25 bp, Artificial Sequence
  Description of Artificial Sequence: Synthetic oligonucleotide
tgaattggagcatgctactggagac

SEQ ID NO: 2674 - DNA, 25 bp, Artificial Sequence
  Description of Artificial Sequence: Synthetic oligonucleotide
gaattggagcatgctactggagact

SEQ ID NO: 2675 - DNA, 25 bp, Artificial Sequence
  Description of Artificial Sequence: Synthetic oligonucleotide
aattggagcatgctactggagactc

SEQ ID NO: 2676 - DNA, 25 bp, Artificial Sequence
  Description of Artificial Sequence: Synthetic oligonucleotide
attggagcatgctactggagactct

SEQ ID NO: 2677 - DNA, 25 bp, Artificial Sequence
  Description of Artificial Sequence: Synthetic oligonucleotide
ttggagcatgctactggagactctg

SEQ ID NO: 2678 - DNA, 25 bp, Artificial Sequence
  Description of Artificial Sequence: Synthetic oligonucleotide
tggagcatgctactggagactctgc

SEQ ID NO: 2679 - DNA, 25 bp, Artificial Sequence
  Description of Artificial Sequence: Synthetic oligonucleotide
ggagcatgctactggagactctgcg

SEQ ID NO: 2680 - DNA, 25 bp, Artificial Sequence
  Description of Artificial Sequence: Synthetic oligonucleotide
gagcatgctactggagactctgcgg

SEQ ID NO: 2681 - DNA, 25 bp, Artificial Sequence
  Description of Artificial Sequence: Synthetic oligonucleotide
agcatgctactggagactctgcggt

SEQ ID NO: 2682 - DNA, 25 bp, Artificial Sequence
  Description of Artificial Sequence: Synthetic oligonucleotide
gcatgctactggagactctgcggta

SEQ ID NO: 2683 - DNA, 25 bp, Artificial Sequence
  Description of Artificial Sequence: Synthetic oligonucleotide
catgctactggagactctgcggtag

SEQ ID NO: 2684 - DNA, 25 bp, Artificial Sequence
  Description of Artificial Sequence: Synthetic oligonucleotide
atgctactggagactctgcggtagc

SEQ ID NO: 2685 - DNA, 25 bp, Artificial Sequence
  Description of Artificial Sequence: Synthetic oligonucleotide
tgctactggagactctgcggtagcg

SEQ ID NO: 2686 - DNA, 25 bp, Artificial Sequence
  Description of Artificial Sequence: Synthetic oligonucleotide
gctactggagactctgcggtagcgc

SEQ ID NO: 2687 - DNA, 25 bp, Artificial Sequence
  Description of Artificial Sequence: Synthetic oligonucleotide
ctactggagactctgcggtagcgct

SEQ ID NO: 2688 - DNA, 25 bp, Artificial Sequence
  Description of Artificial Sequence: Synthetic oligonucleotide
tactggagactctgcggtagcgctg

SEQ ID NO: 2689 - DNA, 25 bp, Artificial Sequence
  Description of Artificial Sequence: Synthetic oligonucleotide
actggagactctgcggtagcgctgc

SEQ ID NO: 2690 - DNA, 25 bp, Artificial Sequence
  Description of Artificial Sequence: Synthetic oligonucleotide
ctggagactctgcggtagcgctgcc

SEQ ID NO: 2691 - DNA, 25 bp, Artificial Sequence
  Description of Artificial Sequence: Synthetic oligonucleotide
tggagactctgcggtagcgctgcct

SEQ ID NO: 2692 - DNA, 25 bp, Artificial Sequence
  Description of Artificial Sequence: Synthetic oligonucleotide
ggagactctgcggtagcgctgcctt

SEQ ID NO: 2693 - DNA, 25 bp, Artificial Sequence
  Description of Artificial Sequence: Synthetic oligonucleotide
gagactctgcggtagcgctgccttt

SEQ ID NO: 2694 - DNA, 25 bp, Artificial Sequence
  Description of Artificial Sequence: Synthetic oligonucleotide
agactctgcggtagcgctgccttta

SEQ ID NO: 2695 - DNA, 25 bp, Artificial Sequence
  Description of Artificial Sequence: Synthetic oligonucleotide
gactctgcggtagcgctgcctttag

SEQ ID NO: 2696 - DNA, 25 bp, Artificial Sequence
  Description of Artificial Sequence: Synthetic oligonucleotide
actctgcggtagcgctgcctttagc

SEQ ID NO: 2697 - DNA, 25 bp, Artificial Sequence
  Description of Artificial Sequence: Synthetic oligonucleotide
ctctgcggtagcgctgcctttagcc

SEQ ID NO: 2698 - DNA, 25 bp, Artificial Sequence
  Description of Artificial Sequence: Synthetic oligonucleotide
tctgcggtagcgctgcctttagcca

SEQ ID NO: 2699 - DNA, 25 bp, Artificial Sequence
  Description of Artificial Sequence: Synthetic oligonucleotide
ctgcggtagcgctgcctttagccag

SEQ ID NO: 2700 - DNA, 25 bp, Artificial Sequence
  Description of Artificial Sequence: Synthetic oligonucleotide
tgcggtagcgctgcctttagccagc

SEQ ID NO: 2701 - DNA, 25 bp, Artificial Sequence
  Description of Artificial Sequence: Synthetic oligonucleotide
gcggtagcgctgcctttagccagcg

SEQ ID NO: 2702 - DNA, 25 bp, Artificial Sequence
  Description of Artificial Sequence: Synthetic oligonucleotide
cggtagcgctgcctttagccagcgg

SEQ ID NO: 2703 - DNA, 25 bp, Artificial Sequence
  Description of Artificial Sequence: Synthetic oligonucleotide
ggtagcgctgcctttagccagcggg

SEQ ID NO: 2704 - DNA, 25 bp, Artificial Sequence
  Description of Artificial Sequence: Synthetic oligonucleotide
gtagcgctgcctttagccagcgggt

SEQ ID NO: 2705 - DNA, 25 bp, Artificial Sequence
  Description of Artificial Sequence: Synthetic oligonucleotide
tagcgctgcctttagccagcgggtc

SEQ ID NO: 2706 - DNA, 25 bp, Artificial Sequence
  Description of Artificial Sequence: Synthetic oligonucleotide
agcgctgcctttagccagcgggtct

SEQ ID NO: 2707 - DNA, 25 bp, Artificial Sequence
  Description of Artificial Sequence: Synthetic oligonucleotide
gcgctgcctttagccagcgggtctg

SEQ ID NO: 2708 - DNA, 25 bp, Artificial Sequence
  Description of Artificial Sequence: Synthetic oligonucleotide
cgctgcctttagccagcgggtctga

SEQ ID NO: 2709 - DNA, 25 bp, Artificial Sequence
  Description of Artificial Sequence: Synthetic oligonucleotide
gctgcctttagccagcgggtctgag

SEQ ID NO: 2710 - DNA, 25 bp, Artificial Sequence
  Description of Artificial Sequence: Synthetic oligonucleotide
ctgcctttagccagcgggtctgagg

SEQ ID NO: 2711 - DNA, 25 bp, Artificial Sequence
  Description of Artificial Sequence: Synthetic oligonucleotide
tgcctttagccagcgggtctgagga

SEQ ID NO: 2712 - DNA, 25 bp, Artificial Sequence
  Description of Artificial Sequence: Synthetic oligonucleotide
gcctttagccagcgggtctgaggat

SEQ ID NO: 2713 - DNA, 25 bp, Artificial Sequence
  Description of Artificial Sequence: Synthetic oligonucleotide
cctttagccagcgggtctgaggata

SEQ ID NO: 2714 - DNA, 25 bp, Artificial Sequence
  Description of Artificial Sequence: Synthetic oligonucleotide
ctttagccagcgggtctgaggataa

SEQ ID NO: 2715 - DNA, 25 bp, Artificial Sequence
  Description of Artificial Sequence: Synthetic oligonucleotide
tttagccagcgggtctgaggataag

SEQ ID NO: 2716 - DNA, 25 bp, Artificial Sequence
  Description of Artificial Sequence: Synthetic oligonucleotide
ttagccagcgggtctgaggataagc

SEQ ID NO: 2717 - DNA, 25 bp, Artificial Sequence
  Description of Artificial Sequence: Synthetic oligonucleotide
tagccagcgggtctgaggataagcc

SEQ ID NO: 2718 - DNA, 25 bp, Artificial Sequence
  Description of Artificial Sequence: Synthetic oligonucleotide
agccagcgggtctgaggataagcca

SEQ ID NO: 2719 - DNA, 25 bp, Artificial Sequence
  Description of Artificial Sequence: Synthetic oligonucleotide
gccagcgggtctgaggataagccac

SEQ ID NO: 2720 - DNA, 25 bp, Artificial Sequence
  Description of Artificial Sequence: Synthetic oligonucleotide
ccagcgggtctgaggataagccact

SEQ ID NO: 2721 - DNA, 25 bp, Artificial Sequence
  Description of Artificial Sequence: Synthetic oligonucleotide
cagcgggtctgaggataagccactg

SEQ ID NO: 2722 - DNA, 25 bp, Artificial Sequence
  Description of Artificial Sequence: Synthetic oligonucleotide
agcgggtctgaggataagccactgc

SEQ ID NO: 2723 - DNA, 25 bp, Artificial Sequence
  Description of Artificial Sequence: Synthetic oligonucleotide
gcgggtctgaggataagccactgct

SEQ ID NO: 2724 - DNA, 25 bp, Artificial Sequence
  Description of Artificial Sequence: Synthetic oligonucleotide
cgggtctgaggataagccactgctg

SEQ ID NO: 2725 - DNA, 25 bp, Artificial Sequence
  Description of Artificial Sequence: Synthetic oligonucleotide
gggtctgaggataagccactgctgc

SEQ ID NO: 2726 - DNA, 25 bp, Artificial Sequence
  Description of Artificial Sequence: Synthetic oligonucleotide
ggtctgaggataagccactgctgct

SEQ ID NO: 2727 - DNA, 25 bp, Artificial Sequence
  Description of Artificial Sequence: Synthetic oligonucleotide
gtctgaggataagccactgctgcta

SEQ ID NO: 2728 - DNA, 25 bp, Artificial Sequence
  Description of Artificial Sequence: Synthetic oligonucleotide
tctgaggataagccactgctgctac

SEQ ID NO: 2729 - DNA, 25 bp, Artificial Sequence
  Description of Artificial Sequence: Synthetic oligonucleotide
ctgaggataagccactgctgctact

SEQ ID NO: 2730 - DNA, 25 bp, Artificial Sequence
  Description of Artificial Sequence: Synthetic oligonucleotide
tgaggataagccactgctgctacta

SEQ ID NO: 2731 - DNA, 25 bp, Artificial Sequence
  Description of Artificial Sequence: Synthetic oligonucleotide
gaggataagccactgctgctactac

SEQ ID NO: 2732 - DNA, 25 bp, Artificial Sequence
  Description of Artificial Sequence: Synthetic oligonucleotide
aggataagccactgctgctactact

SEQ ID NO: 2733 - DNA, 25 bp, Artificial Sequence
  Description of Artificial Sequence: Synthetic oligonucleotide
ggataagccactgctgctactactg

SEQ ID NO: 2734 - DNA, 25 bp, Artificial Sequence
  Description of Artificial Sequence: Synthetic oligonucleotide
gataagccactgctgctactactgc

SEQ ID NO: 2735 - DNA, 25 bp, Artificial Sequence
  Description of Artificial Sequence: Synthetic oligonucleotide
ataagccactgctgctactactgcc

SEQ ID NO: 2736 - DNA, 25 bp, Artificial Sequence
  Description of Artificial Sequence: Synthetic oligonucleotide
taagccactgctgctactactgcca

SEQ ID NO: 2737 - DNA, 25 bp, Artificial Sequence
  Description of Artificial Sequence: Synthetic oligonucleotide
aagccactgctgctactactgccat

SEQ ID NO: 2738 - DNA, 25 bp, Artificial Sequence
  Description of Artificial Sequence: Synthetic oligonucleotide
agccactgctgctactactgccatc

SEQ ID NO: 2739 - DNA, 25 bp, Artificial Sequence
  Description of Artificial Sequence: Synthetic oligonucleotide
gccactgctgctactactgccatcc

SEQ ID NO: 2740 - DNA, 25 bp, Artificial Sequence
  Description of Artificial Sequence: Synthetic oligonucleotide
ccactgctgctactactgccatcca

SEQ ID NO: 2741 - DNA, 25 bp, Artificial Sequence
  Description of Artificial Sequence: Synthetic oligonucleotide
cactgctgctactactgccatccaa

SEQ ID NO: 2742 - DNA, 25 bp, Artificial Sequence
  Description of Artificial Sequence: Synthetic oligonucleotide
actgctgctactactgccatccaaa

SEQ ID NO: 2743 - DNA, 25 bp, Artificial Sequence
  Description of Artificial Sequence: Synthetic oligonucleotide
ctgctgctactactgccatccaaaa

SEQ ID NO: 2744 - DNA, 25 bp, Artificial Sequence
  Description of Artificial Sequence: Synthetic oligonucleotide
tgctgctactactgccatccaaaat

SEQ ID NO: 2745 - DNA, 25 bp, Artificial Sequence
  Description of Artificial Sequence: Synthetic oligonucleotide
gctgctactactgccatccaaaata

SEQ ID NO: 2746 - DNA, 25 bp, Artificial Sequence
  Description of Artificial Sequence: Synthetic oligonucleotide
ctgctactactgccatccaaaatat

SEQ ID NO: 2747 - DNA, 25 bp, Artificial Sequence
  Description of Artificial Sequence: Synthetic oligonucleotide
tgctactactgccatccaaaatatc

SEQ ID NO: 2748 - DNA, 25 bp, Artificial Sequence
  Description of Artificial Sequence: Synthetic oligonucleotide
gctactactgccatccaaaatatct

SEQ ID NO: 2749 - DNA, 25 bp, Artificial Sequence
  Description of Artificial Sequence: Synthetic oligonucleotide
ctactactgccatccaaaatatctg

SEQ ID NO: 2750 - DNA, 25 bp, Artificial Sequence
  Description of Artificial Sequence: Synthetic oligonucleotide
tactactgccatccaaaatatctga

SEQ ID NO: 2751 - DNA, 25 bp, Artificial Sequence
  Description of Artificial Sequence: Synthetic oligonucleotide
actactgccatccaaaatatctgaa

SEQ ID NO: 2752 - DNA, 25 bp, Artificial Sequence
  Description of Artificial Sequence: Synthetic oligonucleotide
ctactgccatccaaaatatctgaac

SEQ ID NO: 2753 - DNA, 25 bp, Artificial Sequence
  Description of Artificial Sequence: Synthetic oligonucleotide
tactgccatccaaaatatctgaact

SEQ ID NO: 2754 - DNA, 25 bp, Artificial Sequence
  Description of Artificial Sequence: Synthetic oligonucleotide
actgccatccaaaatatctgaactg

SEQ ID NO: 2755 - DNA, 25 bp, Artificial Sequence
  Description of Artificial Sequence: Synthetic oligonucleotide
ctgccatccaaaatatctgaactga

SEQ ID NO: 2756 - DNA, 25 bp, Artificial Sequence
  Description of Artificial Sequence: Synthetic oligonucleotide
tgccatccaaaatatctgaactgaa

SEQ ID NO: 2757 - DNA, 25 bp, Artificial Sequence
  Description of Artificial Sequence: Synthetic oligonucleotide
gccatccaaaatatctgaactgaag

SEQ ID NO: 2758 - DNA, 25 bp, Artificial Sequence
  Description of Artificial Sequence: Synthetic oligonucleotide
ccatccaaaatatctgaactgaaga

SEQ ID NO: 2759 - DNA, 25 bp, Artificial Sequence
  Description of Artificial Sequence: Synthetic oligonucleotide
catccaaaatatctgaactgaagac

SEQ ID NO: 2760 - DNA, 25 bp, Artificial Sequence
  Description of Artificial Sequence: Synthetic oligonucleotide
atccaaaatatctgaactgaagaca

SEQ ID NO: 2761 - DNA, 25 bp, Artificial Sequence
  Description of Artificial Sequence: Synthetic oligonucleotide
tccaaaatatctgaactgaagacaa

SEQ ID NO: 2762 - DNA, 25 bp, Artificial Sequence
  Description of Artificial Sequence: Synthetic oligonucleotide
ccaaaatatctgaactgaagacaaa

SEQ ID NO: 2763 - DNA, 25 bp, Artificial Sequence
  Description of Artificial Sequence: Synthetic oligonucleotide
caaaatatctgaactgaagacaaag

SEQ ID NO: 2764 - DNA, 25 bp, Artificial Sequence
  Description of Artificial Sequence: Synthetic oligonucleotide
aaaatatctgaactgaagacaaagc

SEQ ID NO: 2765 - DNA, 25 bp, Artificial Sequence
  Description of Artificial Sequence: Synthetic oligonucleotide
aaatatctgaactgaagacaaagca

SEQ ID NO: 2766 - DNA, 25 bp, Artificial Sequence
  Description of Artificial Sequence: Synthetic oligonucleotide
aatatctgaactgaagacaaagcaa

SEQ ID NO: 2767 - DNA, 25 bp, Artificial Sequence
  Description of Artificial Sequence: Synthetic oligonucleotide
atatctgaactgaagacaaagcaaa

SEQ ID NO: 2768 - DNA, 25 bp, Artificial Sequence
  Description of Artificial Sequence: Synthetic oligonucleotide
tatctgaactgaagacaaagcaaaa

SEQ ID NO: 2769 - DNA, 25 bp, Artificial Sequence
  Description of Artificial Sequence: Synthetic oligonucleotide
atctgaactgaagacaaagcaaaaa

SEQ ID NO: 2770 - DNA, 25 bp, Artificial Sequence
  Description of Artificial Sequence: Synthetic oligonucleotide
tctgaactgaagacaaagcaaaaag

SEQ ID NO: 2771 - DNA, 25 bp, Artificial Sequence
  Description of Artificial Sequence: Synthetic oligonucleotide
ctgaactgaagacaaagcaaaaaga

SEQ ID NO: 2772 - DNA, 25 bp, Artificial Sequence
  Description of Artificial Sequence: Synthetic oligonucleotide
tgaactgaagacaaagcaaaaagaa

SEQ ID NO: 2773 - DNA, 25 bp, Artificial Sequence
  Description of Artificial Sequence: Synthetic oligonucleotide
gaactgaagacaaagcaaaaagaat

SEQ ID NO: 2774 - DNA, 25 bp, Artificial Sequence
  Description of Artificial Sequence: Synthetic oligonucleotide
aactgaagacaaagcaaaaagaatt

SEQ ID NO: 2775 - DNA, 25 bp, Artificial Sequence
  Description of Artificial Sequence: Synthetic oligonucleotide
actgaagacaaagcaaaaagaatta

SEQ ID NO: 2776 - DNA, 25 bp, Artificial Sequence
  Description of Artificial Sequence: Synthetic oligonucleotide
ctgaagacaaagcaaaaagaattat

SEQ ID NO: 2777 - DNA, 25 bp, Artificial Sequence
  Description of Artificial Sequence: Synthetic oligonucleotide
tgaagacaaagcaaaaagaattata

SEQ ID NO: 2778 - DNA, 25 bp, Artificial Sequence
  Description of Artificial Sequence: Synthetic oligonucleotide
gaagacaaagcaaaaagaattataa

SEQ ID NO: 2779 - DNA, 25 bp, Artificial Sequence
  Description of Artificial Sequence: Synthetic oligonucleotide
aagacaaagcaaaaagaattataag

SEQ ID NO: 2780 - DNA, 25 bp, Artificial Sequence
  Description of Artificial Sequence: Synthetic oligonucleotide
agacaaagcaaaaagaattataagc

SEQ ID NO: 2781 - DNA, 25 bp, Artificial Sequence
  Description of Artificial Sequence: Synthetic oligonucleotide
gacaaagcaaaaagaattataagca

SEQ ID NO: 2782 - DNA, 25 bp, Artificial Sequence
  Description of Artificial Sequence: Synthetic oligonucleotide
acaaagcaaaaagaattataagcaa

SEQ ID NO: 2783 - DNA, 25 bp, Artificial Sequence
  Description of Artificial Sequence: Synthetic oligonucleotide
caaagcaaaaagaattataagcaaa

SEQ ID NO: 2784 - DNA, 25 bp, Artificial Sequence
  Description of Artificial Sequence: Synthetic oligonucleotide
aaagcaaaaagaattataagcaaat

SEQ ID NO: 2785 - DNA, 25 bp, Artificial Sequence
  Description of Artificial Sequence: Synthetic oligonucleotide
aagcaaaaagaattataagcaaatg

SEQ ID NO: 2786 - DNA, 25 bp, Artificial Sequence
  Description of Artificial Sequence: Synthetic oligonucleotide
agcaaaaagaattataagcaaatgc

SEQ ID NO: 2787 - DNA, 25 bp, Artificial Sequence
  Description of Artificial Sequence: Synthetic oligonucleotide
gcaaaaagaattataagcaaatgca

SEQ ID NO: 2788 - DNA, 25 bp, Artificial Sequence
  Description of Artificial Sequence: Synthetic oligonucleotide
caaaaagaattataagcaaatgcaa

SEQ ID NO: 2789 - DNA, 25 bp, Artificial Sequence
  Description of Artificial Sequence: Synthetic oligonucleotide
aaaaagaattataagcaaatgcaac

SEQ ID NO: 2790 - DNA, 25 bp, Artificial Sequence
  Description of Artificial Sequence: Synthetic oligonucleotide
aaaagaattataagcaaatgcaact

SEQ ID NO: 2791 - DNA, 25 bp, Artificial Sequence
  Description of Artificial Sequence: Synthetic oligonucleotide
aaagaattataagcaaatgcaacta

SEQ ID NO: 2792 - DNA, 25 bp, Artificial Sequence
  Description of Artificial Sequence: Synthetic oligonucleotide
aagaattataagcaaatgcaactat

SEQ ID NO: 2793 - DNA, 25 bp, Artificial Sequence
  Description of Artificial Sequence: Synthetic oligonucleotide
agaattataagcaaatgcaactatc

SEQ ID NO: 2794 - DNA, 25 bp, Artificial Sequence
  Description of Artificial Sequence: Synthetic oligonucleotide
gaattataagcaaatgcaactatca

SEQ ID NO: 2795 - DNA, 25 bp, Artificial Sequence
  Description of Artificial Sequence: Synthetic oligonucleotide
aattataagcaaatgcaactatcag

SEQ ID NO: 2796 - DNA, 25 bp, Artificial Sequence
  Description of Artificial Sequence: Synthetic oligonucleotide
attataagcaaatgcaactatcagg

SEQ ID NO: 2797 - DNA, 25 bp, Artificial Sequence
  Description of Artificial Sequence: Synthetic oligonucleotide
ttataagcaaatgcaactatcaggg

SEQ ID NO: 2798 - DNA, 25 bp, Artificial Sequence
  Description of Artificial Sequence: Synthetic oligonucleotide
tataagcaaatgcaactatcagggt

SEQ ID NO: 2799 - DNA, 25 bp, Artificial Sequence
  Description of Artificial Sequence: Synthetic oligonucleotide
ataagcaaatgcaactatcagggta

SEQ ID NO: 2800 - DNA, 25 bp, Artificial Sequence
  Description of Artificial Sequence: Synthetic oligonucleotide
taagcaaatgcaactatcagggtaa

SEQ ID NO: 2801 - DNA, 25 bp, Artificial Sequence
  Description of Artificial Sequence: Synthetic oligonucleotide
aagcaaatgcaactatcagggtaaa

SEQ ID NO: 2802 - DNA, 25 bp, Artificial Sequence
  Description of Artificial Sequence: Synthetic oligonucleotide
gaagagcacatgcctgcagctgtgg

SEQ ID NO: 2803 - DNA, 25 bp, Artificial Sequence
  Description of Artificial Sequence: Synthetic oligonucleotide
aagagcacatgcctgcagctgtgga

SEQ ID NO: 2804 - DNA, 25 bp, Artificial Sequence
  Description of Artificial Sequence: Synthetic oligonucleotide
agagcacatgcctgcagctgtggac

SEQ ID NO: 2805 - DNA, 25 bp, Artificial Sequence
  Description of Artificial Sequence: Synthetic oligonucleotide
gagcacatgcctgcagctgtggaca

SEQ ID NO: 2806 - DNA, 25 bp, Artificial Sequence
  Description of Artificial Sequence: Synthetic oligonucleotide
agcacatgcctgcagctgtggacac

SEQ ID NO: 2807 - DNA, 25 bp, Artificial Sequence
  Description of Artificial Sequence: Synthetic oligonucleotide
gcacatgcctgcagctgtggacaca

SEQ ID NO: 2808 - DNA, 25 bp, Artificial Sequence
  Description of Artificial Sequence: Synthetic oligonucleotide
cacatgcctgcagctgtggacacag

SEQ ID NO: 2809 - DNA, 25 bp, Artificial Sequence
  Description of Artificial Sequence: Synthetic oligonucleotide
acatgcctgcagctgtggacacagc

SEQ ID NO: 2810 - DNA, 25 bp, Artificial Sequence
  Description of Artificial Sequence: Synthetic oligonucleotide
catgcctgcagctgtggacacagca

SEQ ID NO: 2811 - DNA, 25 bp, Artificial Sequence
  Description of Artificial Sequence: Synthetic oligonucleotide
atgcctgcagctgtggacacagcat

SEQ ID NO: 2812 - DNA, 25 bp, Artificial Sequence
  Description of Artificial Sequence: Synthetic oligonucleotide
tgcctgcagctgtggacacagcatc

SEQ ID NO: 2813 - DNA, 25 bp, Artificial Sequence
  Description of Artificial Sequence: Synthetic oligonucleotide
gcctgcagctgtggacacagcatct

SEQ ID NO: 2814 - DNA, 25 bp, Artificial Sequence
  Description of Artificial Sequence: Synthetic oligonucleotide
cctgcagctgtggacacagcatctg

SEQ ID NO: 2815 - DNA, 25 bp, Artificial Sequence
  Description of Artificial Sequence: Synthetic oligonucleotide
ctgcagctgtggacacagcatctgt

SEQ ID NO: 2816 - DNA, 25 bp, Artificial Sequence
  Description of Artificial Sequence: Synthetic oligonucleotide
tgcagctgtggacacagcatctgtc

SEQ ID NO: 2817 - DNA, 25 bp, Artificial Sequence
  Description of Artificial Sequence: Synthetic oligonucleotide
gcagctgtggacacagcatctgtcc

SEQ ID NO: 2818 - DNA, 25 bp, Artificial Sequence
  Description of Artificial Sequence: Synthetic oligonucleotide
cagctgtggacacagcatctgtccc

SEQ ID NO: 2819 - DNA, 25 bp, Artificial Sequence
  Description of Artificial Sequence: Synthetic oligonucleotide
agctgtggacacagcatctgtcccc

SEQ ID NO: 2820 - DNA, 25 bp, Artificial Sequence
  Description of Artificial Sequence: Synthetic oligonucleotide
gctgtggacacagcatctgtcccct

SEQ ID NO: 2821 - DNA, 25 bp, Artificial Sequence
  Description of Artificial Sequence: Synthetic oligonucleotide
ctgtggacacagcatctgtcccctg

SEQ ID NO: 2822 - DNA, 25 bp, Artificial Sequence
  Description of Artificial Sequence: Synthetic oligonucleotide
tgtggacacagcatctgtcccctgc

SEQ ID NO: 2823 - DNA, 25 bp, Artificial Sequence
  Description of Artificial Sequence: Synthetic oligonucleotide
gtggacacagcatctgtcccctgcc

SEQ ID NO: 2824 - DNA, 25 bp, Artificial Sequence
  Description of Artificial Sequence: Synthetic oligonucleotide
tggacacagcatctgtcccctgcct

SEQ ID NO: 2825 - DNA, 25 bp, Artificial Sequence
  Description of Artificial Sequence: Synthetic oligonucleotide
ggacacagcatctgtcccctgccta

SEQ ID NO: 2826 - DNA, 25 bp, Artificial Sequence
  Description of Artificial Sequence: Synthetic oligonucleotide
gacacagcatctgtcccctgcctac

SEQ ID NO: 2827 - DNA, 25 bp, Artificial Sequence
  Description of Artificial Sequence: Synthetic oligonucleotide
acacagcatctgtcccctgcctaca

SEQ ID NO: 2828 - DNA, 25 bp, Artificial Sequence
  Description of Artificial Sequence: Synthetic oligonucleotide
cacagcatctgtcccctgcctacag

SEQ ID NO: 2829 - DNA, 25 bp, Artificial Sequence
  Description of Artificial Sequence: Synthetic oligonucleotide
acagcatctgtcccctgcctacagg

SEQ ID NO: 2830 - DNA, 25 bp, Artificial Sequence
  Description of Artificial Sequence: Synthetic oligonucleotide
cagcatctgtcccctgcctacaggt

SEQ ID NO: 2831 - DNA, 25 bp, Artificial Sequence
  Description of Artificial Sequence: Synthetic oligonucleotide
agcatctgtcccctgcctacaggtg

SEQ ID NO: 2832 - DNA, 25 bp, Artificial Sequence
  Description of Artificial Sequence: Synthetic oligonucleotide
gcatctgtcccctgcctacaggtga

SEQ ID NO: 2833 - DNA, 25 bp, Artificial Sequence
  Description of Artificial Sequence: Synthetic oligonucleotide
catctgtcccctgcctacaggtgaa

SEQ ID NO: 2834 - DNA, 25 bp, Artificial Sequence
  Description of Artificial Sequence: Synthetic oligonucleotide
atctgtcccctgcctacaggtgaac

SEQ ID NO: 2835 - DNA, 25 bp, Artificial Sequence
  Description of Artificial Sequence: Synthetic oligonucleotide
tctgtcccctgcctacaggtgaact

SEQ ID NO: 2836 - DNA, 25 bp, Artificial Sequence
  Description of Artificial Sequence: Synthetic oligonucleotide
ctgtcccctgcctacaggtgaactt

SEQ ID NO: 2837 - DNA, 25 bp, Artificial Sequence
  Description of Artificial Sequence: Synthetic oligonucleotide
tgtcccctgcctacaggtgaacttg

SEQ ID NO: 2838 - DNA, 25 bp, Artificial Sequence
  Description of Artificial Sequence: Synthetic oligonucleotide
gtcccctgcctacaggtgaacttgt

SEQ ID NO: 2839 - DNA, 25 bp, Artificial Sequence
  Description of Artificial Sequence: Synthetic oligonucleotide
tcccctgcctacaggtgaacttgtc

SEQ ID NO: 2840 - DNA, 25 bp, Artificial Sequence
  Description of Artificial Sequence: Synthetic oligonucleotide
cccctgcctacaggtgaacttgtca

SEQ ID NO: 2841 - DNA, 25 bp, Artificial Sequence
  Description of Artificial Sequence: Synthetic oligonucleotide
ccctgcctacaggtgaacttgtcac

SEQ ID NO: 2842 - DNA, 25 bp, Artificial Sequence
  Description of Artificial Sequence: Synthetic oligonucleotide
cctgcctacaggtgaacttgtcacc

SEQ ID NO: 2843 - DNA, 25 bp, Artificial Sequence
  Description of Artificial Sequence: Synthetic oligonucleotide
ctgcctacaggtgaacttgtcaccc

SEQ ID NO: 2844 - DNA, 25 bp, Artificial Sequence
  Description of Artificial Sequence: Synthetic oligonucleotide
tgcctacaggtgaacttgtcaccca

SEQ ID NO: 2845 - DNA, 25 bp, Artificial Sequence
  Description of Artificial Sequence: Synthetic oligonucleotide
gcctacaggtgaacttgtcacccac

SEQ ID NO: 2846 - DNA, 25 bp, Artificial Sequence
  Description of Artificial Sequence: Synthetic oligonucleotide
cctacaggtgaacttgtcacccact

SEQ ID NO: 2847 - DNA, 25 bp, Artificial Sequence
  Description of Artificial Sequence: Synthetic oligonucleotide
ctacaggtgaacttgtcacccactt

SEQ ID NO: 2848 - DNA, 25 bp, Artificial Sequence
  Description of Artificial Sequence: Synthetic oligonucleotide
tacaggtgaacttgtcacccacttt

SEQ ID NO: 2849 - DNA, 25 bp, Artificial Sequence
  Description of Artificial Sequence: Synthetic oligonucleotide
acaggtgaacttgtcacccactttc

SEQ ID NO: 2850 - DNA, 25 bp, Artificial Sequence
  Description of Artificial Sequence: Synthetic oligonucleotide
caggtgaacttgtcacccactttct

SEQ ID NO: 2851 - DNA, 25 bp, Artificial Sequence
  Description of Artificial Sequence: Synthetic oligonucleotide
aggtgaacttgtcacccactttctg

SEQ ID NO: 2852 - DNA, 25 bp, Artificial Sequence
  Description of Artificial Sequence: Synthetic oligonucleotide
ggtgaacttgtcacccactttctga

SEQ ID NO: 2853 - DNA, 25 bp, Artificial Sequence
  Description of Artificial Sequence: Synthetic oligonucleotide
gtgaacttgtcacccactttctgac

SEQ ID NO: 2854 - DNA, 25 bp, Artificial Sequence
  Description of Artificial Sequence: Synthetic oligonucleotide
tgaacttgtcacccactttctgacc

SEQ ID NO: 2855 - DNA, 25 bp, Artificial Sequence
  Description of Artificial Sequence: Synthetic oligonucleotide
gaacttgtcacccactttctgacca

SEQ ID NO: 2856 - DNA, 25 bp, Artificial Sequence
  Description of Artificial Sequence: Synthetic oligonucleotide
aacttgtcacccactttctgaccac

SEQ ID NO: 2857 - DNA, 25 bp, Artificial Sequence
  Description of Artificial Sequence: Synthetic oligonucleotide
acttgtcacccactttctgaccact

SEQ ID NO: 2858 - DNA, 25 bp, Artificial Sequence
  Description of Artificial Sequence: Synthetic oligonucleotide
cttgtcacccactttctgaccactg

SEQ ID NO: 2859 - DNA, 25 bp, Artificial Sequence
  Description of Artificial Sequence: Synthetic oligonucleotide
ttgtcacccactttctgaccactga

SEQ ID NO: 2860 - DNA, 25 bp, Artificial Sequence
  Description of Artificial Sequence: Synthetic oligonucleotide
tgtcacccactttctgaccactgac

SEQ ID NO: 2861 - DNA, 25 bp, Artificial Sequence
  Description of Artificial Sequence: Synthetic oligonucleotide
gtcacccactttctgaccactgacg

SEQ ID NO: 2862 - DNA, 25 bp, Artificial Sequence
  Description of Artificial Sequence: Synthetic oligonucleotide
tcacccactttctgaccactgacgt

SEQ ID NO: 2863 - DNA, 25 bp, Artificial Sequence
  Description of Artificial Sequence: Synthetic oligonucleotide
cacccactttctgaccactgacgtg

SEQ ID NO: 2864 - DNA, 25 bp, Artificial Sequence
  Description of Artificial Sequence: Synthetic oligonucleotide
acccactttctgaccactgacgtgg

SEQ ID NO: 2865 - DNA, 25 bp, Artificial Sequence
  Description of Artificial Sequence: Synthetic oligonucleotide
cccactttctgaccactgacgtgga

SEQ ID NO: 2866 - DNA, 25 bp, Artificial Sequence
  Description of Artificial Sequence: Synthetic oligonucleotide
ccactttctgaccactgacgtggac

SEQ ID NO: 2867 - DNA, 25 bp, Artificial Sequence
  Description of Artificial Sequence: Synthetic oligonucleotide
cactttctgaccactgacgtggaca

SEQ ID NO: 2868 - DNA, 25 bp, Artificial Sequence
  Description of Artificial Sequence: Synthetic oligonucleotide
actttctgaccactgacgtggacag

SEQ ID NO: 2869 - DNA, 25 bp, Artificial Sequence
  Description of Artificial Sequence: Synthetic oligonucleotide
ctttctgaccactgacgtggacagc

SEQ ID NO: 2870 - DNA, 25 bp, Artificial Sequence
  Description of Artificial Sequence: Synthetic oligonucleotide
tttctgaccactgacgtggacagct

SEQ ID NO: 2871 - DNA, 25 bp, Artificial Sequence
  Description of Artificial Sequence: Synthetic oligonucleotide
ttctgaccactgacgtggacagctt

SEQ ID NO: 2872 - DNA, 25 bp, Artificial Sequence
  Description of Artificial Sequence: Synthetic oligonucleotide
tctgaccactgacgtggacagcttg

SEQ ID NO: 2873 - DNA, 25 bp, Artificial Sequence
  Description of Artificial Sequence: Synthetic oligonucleotide
ctgaccactgacgtggacagcttgt

SEQ ID NO: 2874 - DNA, 25 bp, Artificial Sequence
  Description of Artificial Sequence: Synthetic oligonucleotide
tgaccactgacgtggacagcttgtc

SEQ ID NO: 2875 - DNA, 25 bp, Artificial Sequence
  Description of Artificial Sequence: Synthetic oligonucleotide
gaccactgacgtggacagcttgtcc

SEQ ID NO: 2876 - DNA, 25 bp, Artificial Sequence
  Description of Artificial Sequence: Synthetic oligonucleotide
accactgacgtggacagcttgtcct

SEQ ID NO: 2877 - DNA, 25 bp, Artificial Sequence
  Description of Artificial Sequence: Synthetic oligonucleotide
ccactgacgtggacagcttgtccta

SEQ ID NO: 2878 - DNA, 25 bp, Artificial Sequence
  Description of Artificial Sequence: Synthetic oligonucleotide
cactgacgtggacagcttgtcctac

SEQ ID NO: 2879 - DNA, 25 bp, Artificial Sequence
  Description of Artificial Sequence: Synthetic oligonucleotide
actgacgtggacagcttgtcctacc

SEQ ID NO: 2880 - DNA, 25 bp, Artificial Sequence
  Description of Artificial Sequence: Synthetic oligonucleotide
ctgacgtggacagcttgtcctacct

SEQ ID NO: 2881 - DNA, 25 bp, Artificial Sequence
  Description of Artificial Sequence: Synthetic oligonucleotide
tgacgtggacagcttgtcctacctg

SEQ ID NO: 2882 - DNA, 25 bp, Artificial Sequence
  Description of Artificial Sequence: Synthetic oligonucleotide
gacgtggacagcttgtcctacctga

SEQ ID NO: 2883 - DNA, 25 bp, Artificial Sequence
  Description of Artificial Sequence: Synthetic oligonucleotide
acgtggacagcttgtcctacctgaa

SEQ ID NO: 2884 - DNA, 25 bp, Artificial Sequence
  Description of Artificial Sequence: Synthetic oligonucleotide
cgtggacagcttgtcctacctgaag

SEQ ID NO: 2885 - DNA, 25 bp, Artificial Sequence
  Description of Artificial Sequence: Synthetic oligonucleotide
gtggacagcttgtcctacctgaaga

SEQ ID NO: 2886 - DNA, 25 bp, Artificial Sequence
  Description of Artificial Sequence: Synthetic oligonucleotide
tggacagcttgtcctacctgaagaa

SEQ ID NO: 2887 - DNA, 25 bp, Artificial Sequence
  Description of Artificial Sequence: Synthetic oligonucleotide
ggacagcttgtcctacctgaagaag

SEQ ID NO: 2888 - DNA, 25 bp, Artificial Sequence
  Description of Artificial Sequence: Synthetic oligonucleotide
gacagcttgtcctacctgaagaagg

SEQ ID NO: 2889 - DNA, 25 bp, Artificial Sequence
  Description of Artificial Sequence: Synthetic oligonucleotide
acagcttgtcctacctgaagaaggt

SEQ ID NO: 2890 - DNA, 25 bp, Artificial Sequence
  Description of Artificial Sequence: Synthetic oligonucleotide
cagcttgtcctacctgaagaaggtc

SEQ ID NO: 2891 - DNA, 25 bp, Artificial Sequence
  Description of Artificial Sequence: Synthetic oligonucleotide
agcttgtcctacctgaagaaggtct

SEQ ID NO: 2892 - DNA, 25 bp, Artificial Sequence
  Description of Artificial Sequence: Synthetic oligonucleotide
gcttgtcctacctgaagaaggtctc

SEQ ID NO: 2893 - DNA, 25 bp, Artificial Sequence
  Description of Artificial Sequence: Synthetic oligonucleotide
cttgtcctacctgaagaaggtctct

SEQ ID NO: 2894 - DNA, 25 bp, Artificial Sequence
  Description of Artificial Sequence: Synthetic oligonucleotide
ttgtcctacctgaagaaggtctcta

SEQ ID NO: 2895 - DNA, 25 bp, Artificial Sequence
  Description of Artificial Sequence: Synthetic oligonucleotide
tgtcctacctgaagaaggtctctat

SEQ ID NO: 2896 - DNA, 25 bp, Artificial Sequence
  Description of Artificial Sequence: Synthetic oligonucleotide
gtcctacctgaagaaggtctctatg

SEQ ID NO: 2897 - DNA, 25 bp, Artificial Sequence
  Description of Artificial Sequence: Synthetic oligonucleotide
tcctacctgaagaaggtctctatgg

SEQ ID NO: 2898 - DNA, 25 bp, Artificial Sequence
  Description of Artificial Sequence: Synthetic oligonucleotide
cctacctgaagaaggtctctatgga

SEQ ID NO: 2899 - DNA, 25 bp, Artificial Sequence
  Description of Artificial Sequence: Synthetic oligonucleotide
ctacctgaagaaggtctctatggag

SEQ ID NO: 2900 - DNA, 25 bp, Artificial Sequence
  Description of Artificial Sequence: Synthetic oligonucleotide
tacctgaagaaggtctctatggagg

SEQ ID NO: 2901 - DNA, 25 bp, Artificial Sequence
  Description of Artificial Sequence: Synthetic oligonucleotide
acctgaagaaggtctctatggaggg

SEQ ID NO: 2902 - DNA, 25 bp, Artificial Sequence
  Description of Artificial Sequence: Synthetic oligonucleotide
cctgaagaaggtctctatggagggc

SEQ ID NO: 2903 - DNA, 25 bp, Artificial Sequence
  Description of Artificial Sequence: Synthetic oligonucleotide
ctgaagaaggtctctatggagggcc

SEQ ID NO: 2904 - DNA, 25 bp, Artificial Sequence
  Description of Artificial Sequence: Synthetic oligonucleotide
tgaagaaggtctctatggagggcca

SEQ ID NO: 2905 - DNA, 25 bp, Artificial Sequence
  Description of Artificial Sequence: Synthetic oligonucleotide
gaagaaggtctctatggagggccat

SEQ ID NO: 2906 - DNA, 25 bp, Artificial Sequence
  Description of Artificial Sequence: Synthetic oligonucleotide
aagaaggtctctatggagggccatc

SEQ ID NO: 2907 - DNA, 25 bp, Artificial Sequence
  Description of Artificial Sequence: Synthetic oligonucleotide
agaaggtctctatggagggccatct

SEQ ID NO: 2908 - DNA, 25 bp, Artificial Sequence
  Description of Artificial Sequence: Synthetic oligonucleotide
gaaggtctctatggagggccatctg

SEQ ID NO: 2909 - DNA, 25 bp, Artificial Sequence
  Description of Artificial Sequence: Synthetic oligonucleotide
aaggtctctatggagggccatctgt

SEQ ID NO: 2910 - DNA, 25 bp, Artificial Sequence
  Description of Artificial Sequence: Synthetic oligonucleotide
aggtctctatggagggccatctgta

SEQ ID NO: 2911 - DNA, 25 bp, Artificial Sequence
  Description of Artificial Sequence: Synthetic oligonucleotide
ggtctctatggagggccatctgtac

SEQ ID NO: 2912 - DNA, 25 bp, Artificial Sequence
  Description of Artificial Sequence: Synthetic oligonucleotide
gtctctatggagggccatctgtaca

SEQ ID NO: 2913 - DNA, 25 bp, Artificial Sequence
  Description of Artificial Sequence: Synthetic oligonucleotide
tctctatggagggccatctgtacaa

SEQ ID NO: 2914 - DNA, 25 bp, Artificial Sequence
  Description of Artificial Sequence: Synthetic oligonucleotide
ctctatggagggccatctgtacaat

SEQ ID NO: 2915 - DNA, 25 bp, Artificial Sequence
  Description of Artificial Sequence: Synthetic oligonucleotide
tctatggagggccatctgtacaatg

SEQ ID NO: 2916 - DNA, 25 bp, Artificial Sequence
  Description of Artificial Sequence: Synthetic oligonucleotide
ctatggagggccatctgtacaatgg

SEQ ID NO: 2917 - DNA, 25 bp, Artificial Sequence
  Description of Artificial Sequence: Synthetic oligonucleotide
tatggagggccatctgtacaatggc

SEQ ID NO: 2918 - DNA, 25 bp, Artificial Sequence
  Description of Artificial Sequence: Synthetic oligonucleotide
atggagggccatctgtacaatggct

SEQ ID NO: 2919 - DNA, 25 bp, Artificial Sequence
  Description of Artificial Sequence: Synthetic oligonucleotide
tggagggccatctgtacaatggctt

SEQ ID NO: 2920 - DNA, 25 bp, Artificial Sequence
  Description of Artificial Sequence: Synthetic oligonucleotide
ggagggccatctgtacaatggcttc

SEQ ID NO: 2921 - DNA, 25 bp, Artificial Sequence
  Description of Artificial Sequence: Synthetic oligonucleotide
gagggccatctgtacaatggcttca

SEQ ID NO: 2922 - DNA, 25 bp, Artificial Sequence
  Description of Artificial Sequence: Synthetic oligonucleotide
agggccatctgtacaatggcttcaa

SEQ ID NO: 2923 - DNA, 25 bp, Artificial Sequence
  Description of Artificial Sequence: Synthetic oligonucleotide
gggccatctgtacaatggcttcaac

SEQ ID NO: 2924 - DNA, 25 bp, Artificial Sequence
  Description of Artificial Sequence: Synthetic oligonucleotide
ggccatctgtacaatggcttcaacc

SEQ ID NO: 2925 - DNA, 25 bp, Artificial Sequence
  Description of Artificial Sequence: Synthetic oligonucleotide
gccatctgtacaatggcttcaacct

SEQ ID NO: 2926 - DNA, 25 bp, Artificial Sequence
  Description of Artificial Sequence: Synthetic oligonucleotide
ccatctgtacaatggcttcaacctc

SEQ ID NO: 2927 - DNA, 25 bp, Artificial Sequence
  Description of Artificial Sequence: Synthetic oligonucleotide
catctgtacaatggcttcaacctca

SEQ ID NO: 2928 - DNA, 25 bp, Artificial Sequence
  Description of Artificial Sequence: Synthetic oligonucleotide
atctgtacaatggcttcaacctcat

SEQ ID NO: 2929 - DNA, 25 bp, Artificial Sequence
  Description of Artificial Sequence: Synthetic oligonucleotide
tctgtacaatggcttcaacctcata

SEQ ID NO: 2930 - DNA, 25 bp, Artificial Sequence
  Description of Artificial Sequence: Synthetic oligonucleotide
ctgtacaatggcttcaacctcatag

SEQ ID NO: 2931 - DNA, 25 bp, Artificial Sequence
  Description of Artificial Sequence: Synthetic oligonucleotide
tgtacaatggcttcaacctcatagc

SEQ ID NO: 2932 - DNA, 25 bp, Artificial Sequence
  Description of Artificial Sequence: Synthetic oligonucleotide
gtacaatggcttcaacctcatagca

SEQ ID NO: 2933 - DNA, 25 bp, Artificial Sequence
  Description of Artificial Sequence: Synthetic oligonucleotide
tacaatggcttcaacctcatagcag

SEQ ID NO: 2934 - DNA, 25 bp, Artificial Sequence
  Description of Artificial Sequence: Synthetic oligonucleotide
acaatggcttcaacctcatagcagc

SEQ ID NO: 2935 - DNA, 25 bp, Artificial Sequence
  Description of Artificial Sequence: Synthetic oligonucleotide
caatggcttcaacctcatagcagcc

SEQ ID NO: 2936 - DNA, 25 bp, Artificial Sequence
  Description of Artificial Sequence: Synthetic oligonucleotide
aatggcttcaacctcatagcagccg

SEQ ID NO: 2937 - DNA, 25 bp, Artificial Sequence
  Description of Artificial Sequence: Synthetic oligonucleotide
atggcttcaacctcatagcagccga

SEQ ID NO: 2938 - DNA, 25 bp, Artificial Sequence
  Description of Artificial Sequence: Synthetic oligonucleotide
tggcttcaacctcatagcagccgac

SEQ ID NO: 2939 - DNA, 25 bp, Artificial Sequence
  Description of Artificial Sequence: Synthetic oligonucleotide
ggcttcaacctcatagcagccgacc

SEQ ID NO: 2940 - DNA, 25 bp, Artificial Sequence
  Description of Artificial Sequence: Synthetic oligonucleotide
gcttcaacctcatagcagccgacct

SEQ ID NO: 2941 - DNA, 25 bp, Artificial Sequence
  Description of Artificial Sequence: Synthetic oligonucleotide
cttcaacctcatagcagccgacctg

SEQ ID NO: 2942 - DNA, 25 bp, Artificial Sequence
  Description of Artificial Sequence: Synthetic oligonucleotide
ttcaacctcatagcagccgacctga

SEQ ID NO: 2943 - DNA, 25 bp, Artificial Sequence
  Description of Artificial Sequence: Synthetic oligonucleotide
tcaacctcatagcagccgacctgag

SEQ ID NO: 2944 - DNA, 25 bp, Artificial Sequence
  Description of Artificial Sequence: Synthetic oligonucleotide
caacctcatagcagccgacctgagg

SEQ ID NO: 2945 - DNA, 25 bp, Artificial Sequence
  Description of Artificial Sequence: Synthetic oligonucleotide
aacctcatagcagccgacctgaggt

SEQ ID NO: 2946 - DNA, 25 bp, Artificial Sequence
  Description of Artificial Sequence: Synthetic oligonucleotide
acctcatagcagccgacctgaggtg

SEQ ID NO: 2947 - DNA, 25 bp, Artificial Sequence
  Description of Artificial Sequence: Synthetic oligonucleotide
cctcatagcagccgacctgaggtgg

SEQ ID NO: 2948 - DNA, 25 bp, Artificial Sequence
  Description of Artificial Sequence: Synthetic oligonucleotide
ctcatagcagccgacctgaggtggg

SEQ ID NO: 2949 - DNA, 25 bp, Artificial Sequence
  Description of Artificial Sequence: Synthetic oligonucleotide
tcatagcagccgacctgaggtgggt

SEQ ID NO: 2950 - DNA, 25 bp, Artificial Sequence
  Description of Artificial Sequence: Synthetic oligonucleotide
catagcagccgacctgaggtgggtc

SEQ ID NO: 2951 - DNA, 25 bp, Artificial Sequence
  Description of Artificial Sequence: Synthetic oligonucleotide
atagcagccgacctgaggtgggtct

SEQ ID NO: 2952 - DNA, 25 bp, Artificial Sequence
  Description of Artificial Sequence: Synthetic oligonucleotide
tagcagccgacctgaggtgggtctg

SEQ ID NO: 2953 - DNA, 25 bp, Artificial Sequence
  Description of Artificial Sequence: Synthetic oligonucleotide
agcagccgacctgaggtgggtctgc

SEQ ID NO: 2954 - DNA, 25 bp, Artificial Sequence
  Description of Artificial Sequence: Synthetic oligonucleotide
gcagccgacctgaggtgggtctgcc

SEQ ID NO: 2955 - DNA, 25 bp, Artificial Sequence
  Description of Artificial Sequence: Synthetic oligonucleotide
cagccgacctgaggtgggtctgcca

SEQ ID NO: 2956 - DNA, 25 bp, Artificial Sequence
  Description of Artificial Sequence: Synthetic oligonucleotide
agccgacctgaggtgggtctgccag

SEQ ID NO: 2957 - DNA, 25 bp, Artificial Sequence
  Description of Artificial Sequence: Synthetic oligonucleotide
gccgacctgaggtgggtctgccaga

SEQ ID NO: 2958 - DNA, 25 bp, Artificial Sequence
  Description of Artificial Sequence: Synthetic oligonucleotide
ccgacctgaggtgggtctgccagag

SEQ ID NO: 2959 - DNA, 25 bp, Artificial Sequence
  Description of Artificial Sequence: Synthetic oligonucleotide
cgacctgaggtgggtctgccagagg

SEQ ID NO: 2960 - DNA, 25 bp, Artificial Sequence
  Description of Artificial Sequence: Synthetic oligonucleotide
gacctgaggtgggtctgccagaggg

SEQ ID NO: 2961 - DNA, 25 bp, Artificial Sequence
  Description of Artificial Sequence: Synthetic oligonucleotide
acctgaggtgggtctgccagagggg

SEQ ID NO: 2962 - DNA, 25 bp, Artificial Sequence
  Description of Artificial Sequence: Synthetic oligonucleotide
cctgaggtgggtctgccagaggggg

SEQ ID NO: 2963 - DNA, 25 bp, Artificial Sequence
  Description of Artificial Sequence: Synthetic oligonucleotide
ctgaggtgggtctgccagaggggga

SEQ ID NO: 2964 - DNA, 25 bp, Artificial Sequence
  Description of Artificial Sequence: Synthetic oligonucleotide
tgaggtgggtctgccagagggggat

SEQ ID NO: 2965 - DNA, 25 bp, Artificial Sequence
  Description of Artificial Sequence: Synthetic oligonucleotide
gaggtgggtctgccagagggggatg

SEQ ID NO: 2966 - DNA, 25 bp, Artificial Sequence
  Description of Artificial Sequence: Synthetic oligonucleotide
aggtgggtctgccagagggggatgg

SEQ ID NO: 2967 - DNA, 25 bp, Artificial Sequence
  Description of Artificial Sequence: Synthetic oligonucleotide
ggtgggtctgccagagggggatggc

SEQ ID NO: 2968 - DNA, 25 bp, Artificial Sequence
  Description of Artificial Sequence: Synthetic oligonucleotide
gtgggtctgccagagggggatggcg

SEQ ID NO: 2969 - DNA, 25 bp, Artificial Sequence
  Description of Artificial Sequence: Synthetic oligonucleotide
tgggtctgccagagggggatggcgg

SEQ ID NO: 2970 - DNA, 25 bp, Artificial Sequence
  Description of Artificial Sequence: Synthetic oligonucleotide
gggtctgccagagggggatggcggc

SEQ ID NO: 2971 - DNA, 25 bp, Artificial Sequence
  Description of Artificial Sequence: Synthetic oligonucleotide
ggtctgccagagggggatggcggct

SEQ ID NO: 2972 - DNA, 25 bp, Artificial Sequence
  Description of Artificial Sequence: Synthetic oligonucleotide
gtctgccagagggggatggcggctc

SEQ ID NO: 2973 - DNA, 25 bp, Artificial Sequence
  Description of Artificial Sequence: Synthetic oligonucleotide
tctgccagagggggatggcggctct

SEQ ID NO: 2974 - DNA, 25 bp, Artificial Sequence
  Description of Artificial Sequence: Synthetic oligonucleotide
ctgccagagggggatggcggctctg

SEQ ID NO: 2975 - DNA, 25 bp, Artificial Sequence
  Description of Artificial Sequence: Synthetic oligonucleotide
tgccagagggggatggcggctctgc

SEQ ID NO: 2976 - DNA, 25 bp, Artificial Sequence
  Description of Artificial Sequence: Synthetic oligonucleotide
gccagagggggatggcggctctgcc

SEQ ID NO: 2977 - DNA, 25 bp, Artificial Sequence
  Description of Artificial Sequence: Synthetic oligonucleotide
ccagagggggatggcggctctgccc

SEQ ID NO: 2978 - DNA, 25 bp, Artificial Sequence
  Description of Artificial Sequence: Synthetic oligonucleotide
cagagggggatggcggctctgccca

SEQ ID NO: 2979 - DNA, 25 bp, Artificial Sequence
  Description of Artificial Sequence: Synthetic oligonucleotide
agagggggatggcggctctgcccag

SEQ ID NO: 2980 - DNA, 25 bp, Artificial Sequence
  Description of Artificial Sequence: Synthetic oligonucleotide
gagggggatggcggctctgcccagc

SEQ ID NO: 2981 - DNA, 25 bp, Artificial Sequence
  Description of Artificial Sequence: Synthetic oligonucleotide
agggggatggcggctctgcccagca

SEQ ID NO: 2982 - DNA, 25 bp, Artificial Sequence
  Description of Artificial Sequence: Synthetic oligonucleotide
gggggatggcggctctgcccagcac

SEQ ID NO: 2983 - DNA, 25 bp, Artificial Sequence
  Description of Artificial Sequence: Synthetic oligonucleotide
ggggatggcggctctgcccagcact

SEQ ID NO: 2984 - DNA, 25 bp, Artificial Sequence
  Description of Artificial Sequence: Synthetic oligonucleotide
gggatggcggctctgcccagcactg

SEQ ID NO: 2985 - DNA, 25 bp, Artificial Sequence
  Description of Artificial Sequence: Synthetic oligonucleotide
ggatggcggctctgcccagcactgc

SEQ ID NO: 2986 - DNA, 25 bp, Artificial Sequence
  Description of Artificial Sequence: Synthetic oligonucleotide
gatggcggctctgcccagcactgcc

SEQ ID NO: 2987 - DNA, 25 bp, Artificial Sequence
  Description of Artificial Sequence: Synthetic oligonucleotide
atggcggctctgcccagcactgcct

SEQ ID NO: 2988 - DNA, 25 bp, Artificial Sequence
  Description of Artificial Sequence: Synthetic oligonucleotide
tggcggctctgcccagcactgcctc

SEQ ID NO: 2989 - DNA, 25 bp, Artificial Sequence
  Description of Artificial Sequence: Synthetic oligonucleotide
ggcggctctgcccagcactgcctcg

SEQ ID NO: 2990 - DNA, 25 bp, Artificial Sequence
  Description of Artificial Sequence: Synthetic oligonucleotide
gcggctctgcccagcactgcctcgg

SEQ ID NO: 2991 - DNA, 25 bp, Artificial Sequence
  Description of Artificial Sequence: Synthetic oligonucleotide
cggctctgcccagcactgcctcggg

SEQ ID NO: 2992 - DNA, 25 bp, Artificial Sequence
  Description of Artificial Sequence: Synthetic oligonucleotide
ggctctgcccagcactgcctcgggg

SEQ ID NO: 2993 - DNA, 25 bp, Artificial Sequence
  Description of Artificial Sequence: Synthetic oligonucleotide
gctctgcccagcactgcctcggggg

SEQ ID NO: 2994 - DNA, 25 bp, Artificial Sequence
  Description of Artificial Sequence: Synthetic oligonucleotide
tgcttcctcttccccctctgtgcct

SEQ ID NO: 2995 - DNA, 25 bp, Artificial Sequence
  Description of Artificial Sequence: Synthetic oligonucleotide
gcttcctcttccccctctgtgccta

SEQ ID NO: 2996 - DNA, 25 bp, Artificial Sequence
  Description of Artificial Sequence: Synthetic oligonucleotide
cttcctcttccccctctgtgcctat

SEQ ID NO: 2997 - DNA, 25 bp, Artificial Sequence
  Description of Artificial Sequence: Synthetic oligonucleotide
ttcctcttccccctctgtgcctatc

SEQ ID NO: 2998 - DNA, 25 bp, Artificial Sequence
  Description of Artificial Sequence: Synthetic oligonucleotide
tcctcttccccctctgtgcctatct

SEQ ID NO: 2999 - DNA, 25 bp, Artificial Sequence
  Description of Artificial Sequence: Synthetic oligonucleotide
cctcttccccctctgtgcctatctg

SEQ ID NO: 3000 - DNA, 25 bp, Artificial Sequence
  Description of Artificial Sequence: Synthetic oligonucleotide
ctcttccccctctgtgcctatctgc

SEQ ID NO: 3001 - DNA, 25 bp, Artificial Sequence
  Description of Artificial Sequence: Synthetic oligonucleotide
tcttccccctctgtgcctatctgcc

SEQ ID NO: 3002 - DNA, 25 bp, Artificial Sequence
  Description of Artificial Sequence: Synthetic oligonucleotide
cttccccctctgtgcctatctgccc

SEQ ID NO: 3003 - DNA, 25 bp, Artificial Sequence
  Description of Artificial Sequence: Synthetic oligonucleotide
ttccccctctgtgcctatctgcccc

SEQ ID NO: 3004 - DNA, 25 bp, Artificial Sequence
  Description of Artificial Sequence: Synthetic oligonucleotide
tccccctctgtgcctatctgcccct

SEQ ID NO: 3005 - DNA, 25 bp, Artificial Sequence
  Description of Artificial Sequence: Synthetic oligonucleotide
ccccctctgtgcctatctgcccctc

SEQ ID NO: 3006 - DNA, 25 bp, Artificial Sequence
  Description of Artificial Sequence: Synthetic oligonucleotide
cccctctgtgcctatctgcccctcc

SEQ ID NO: 3007 - DNA, 25 bp, Artificial Sequence
  Description of Artificial Sequence: Synthetic oligonucleotide
ccctctgtgcctatctgcccctcct

SEQ ID NO: 3008 - DNA, 25 bp, Artificial Sequence
  Description of Artificial Sequence: Synthetic oligonucleotide
cctctgtgcctatctgcccctcctg

SEQ ID NO: 3009 - DNA, 25 bp, Artificial Sequence
  Description of Artificial Sequence: Synthetic oligonucleotide
ctctgtgcctatctgcccctcctgc

SEQ ID NO: 3010 - DNA, 25 bp, Artificial Sequence
  Description of Artificial Sequence: Synthetic oligonucleotide
tctgtgcctatctgcccctcctgcc

SEQ ID NO: 3011 - DNA, 25 bp, Artificial Sequence
  Description of Artificial Sequence: Synthetic oligonucleotide
ctgtgcctatctgcccctcctgccc

SEQ ID NO: 3012 - DNA, 25 bp, Artificial Sequence
  Description of Artificial Sequence: Synthetic oligonucleotide
tgtgcctatctgcccctcctgccct

SEQ ID NO: 3013 - DNA, 25 bp, Artificial Sequence
  Description of Artificial Sequence: Synthetic oligonucleotide
gtgcctatctgcccctcctgccctc

SEQ ID NO: 3014 - DNA, 25 bp, Artificial Sequence
  Description of Artificial Sequence: Synthetic oligonucleotide
tgcctatctgcccctcctgccctct

SEQ ID NO: 3015 - DNA, 25 bp, Artificial Sequence
  Description of Artificial Sequence: Synthetic oligonucleotide
gcctatctgcccctcctgccctctc

SEQ ID NO: 3016 - DNA, 25 bp, Artificial Sequence
  Description of Artificial Sequence: Synthetic oligonucleotide
cctatctgcccctcctgccctctca

SEQ ID NO: 3017 - DNA, 25 bp, Artificial Sequence
  Description of Artificial Sequence: Synthetic oligonucleotide
ctatctgcccctcctgccctctcag

SEQ ID NO: 3018 - DNA, 25 bp, Artificial Sequence
  Description of Artificial Sequence: Synthetic oligonucleotide
tatctgcccctcctgccctctcagc

SEQ ID NO: 3019 - DNA, 25 bp, Artificial Sequence
  Description of Artificial Sequence: Synthetic oligonucleotide
atctgcccctcctgccctctcagca

SEQ ID NO: 3020 - DNA, 25 bp, Artificial Sequence
  Description of Artificial Sequence: Synthetic oligonucleotide
tctgcccctcctgccctctcagcag

SEQ ID NO: 3021 - DNA, 25 bp, Artificial Sequence
  Description of Artificial Sequence: Synthetic oligonucleotide
ctgcccctcctgccctctcagcagg

SEQ ID NO: 3022 - DNA, 25 bp, Artificial Sequence
  Description of Artificial Sequence: Synthetic oligonucleotide
tgcccctcctgccctctcagcaggc

SEQ ID NO: 3023 - DNA, 25 bp, Artificial Sequence
  Description of Artificial Sequence: Synthetic oligonucleotide
gcccctcctgccctctcagcaggct

SEQ ID NO: 3024 - DNA, 25 bp, Artificial Sequence
  Description of Artificial Sequence: Synthetic oligonucleotide
cccctcctgccctctcagcaggcta

SEQ ID NO: 3025 - DNA, 25 bp, Artificial Sequence
  Description of Artificial Sequence: Synthetic oligonucleotide
ccctcctgccctctcagcaggctag

SEQ ID NO: 3026 - DNA, 25 bp, Artificial Sequence
  Description of Artificial Sequence: Synthetic oligonucleotide
cctcctgccctctcagcaggctagt

SEQ ID NO: 3027 - DNA, 25 bp, Artificial Sequence
  Description of Artificial Sequence: Synthetic oligonucleotide
ctcctgccctctcagcaggctagtg

SEQ ID NO: 3028 - DNA, 25 bp, Artificial Sequence
  Description of Artificial Sequence: Synthetic oligonucleotide
tcctgccctctcagcaggctagtgc

SEQ ID NO: 3029 - DNA, 25 bp, Artificial Sequence
  Description of Artificial Sequence: Synthetic oligonucleotide
cctgccctctcagcaggctagtgct

SEQ ID NO: 3030 - DNA, 25 bp, Artificial Sequence
  Description of Artificial Sequence: Synthetic oligonucleotide
ctgccctctcagcaggctagtgctc

SEQ ID NO: 3031 - DNA, 25 bp, Artificial Sequence
  Description of Artificial Sequence: Synthetic oligonucleotide
tgccctctcagcaggctagtgctct

SEQ ID NO: 3032 - DNA, 25 bp, Artificial Sequence
  Description of Artificial Sequence: Synthetic oligonucleotide
gccctctcagcaggctagtgctctc

SEQ ID NO: 3033 - DNA, 25 bp, Artificial Sequence
  Description of Artificial Sequence: Synthetic oligonucleotide
ccctctcagcaggctagtgctctca

SEQ ID NO: 3034 - DNA, 25 bp, Artificial Sequence
  Description of Artificial Sequence: Synthetic oligonucleotide
cctctcagcaggctagtgctctcag

SEQ ID NO: 3035 - DNA, 25 bp, Artificial Sequence
  Description of Artificial Sequence: Synthetic oligonucleotide
ctctcagcaggctagtgctctcagc

SEQ ID NO: 3036 - DNA, 25 bp, Artificial Sequence
  Description of Artificial Sequence: Synthetic oligonucleotide
tctcagcaggctagtgctctcagct

SEQ ID NO: 3037 - DNA, 25 bp, Artificial Sequence
  Description of Artificial Sequence: Synthetic oligonucleotide
ctcagcaggctagtgctctcagctt

SEQ ID NO: 3038 - DNA, 25 bp, Artificial Sequence
  Description of Artificial Sequence: Synthetic oligonucleotide
tcagcaggctagtgctctcagcttc

SEQ ID NO: 3039 - DNA, 25 bp, Artificial Sequence
  Description of Artificial Sequence: Synthetic oligonucleotide
cagcaggctagtgctctcagcttcc

SEQ ID NO: 3040 - DNA, 25 bp, Artificial Sequence
  Description of Artificial Sequence: Synthetic oligonucleotide
agcaggctagtgctctcagcttccc

SEQ ID NO: 3041 - DNA, 25 bp, Artificial Sequence
  Description of Artificial Sequence: Synthetic oligonucleotide
gcaggctagtgctctcagcttcccg

SEQ ID NO: 3042 - DNA, 25 bp, Artificial Sequence
  Description of Artificial Sequence: Synthetic oligonucleotide
caggctagtgctctcagcttcccgg

SEQ ID NO: 3043 - DNA, 25 bp, Artificial Sequence
  Description of Artificial Sequence: Synthetic oligonucleotide
aggctagtgctctcagcttcccggc

SEQ ID NO: 3044 - DNA, 25 bp, Artificial Sequence
  Description of Artificial Sequence: Synthetic oligonucleotide
ggctagtgctctcagcttcccggcc

SEQ ID NO: 3045 - DNA, 25 bp, Artificial Sequence
  Description of Artificial Sequence: Synthetic oligonucleotide
gctagtgctctcagcttcccggccc

SEQ ID NO: 3046 - DNA, 25 bp, Artificial Sequence
  Description of Artificial Sequence: Synthetic oligonucleotide
ctagtgctctcagcttcccggcccc

SEQ ID NO: 3047 - DNA, 25 bp, Artificial Sequence
  Description of Artificial Sequence: Synthetic oligonucleotide
tagtgctctcagcttcccggccccc

SEQ ID NO: 3048 - DNA, 25 bp, Artificial Sequence
  Description of Artificial Sequence: Synthetic oligonucleotide
agtgctctcagcttcccggcccccc

SEQ ID NO: 3049 - DNA, 25 bp, Artificial Sequence
  Description of Artificial Sequence: Synthetic oligonucleotide
gtgctctcagcttcccggccccccc

SEQ ID NO: 3050 - DNA, 25 bp, Artificial Sequence
  Description of Artificial Sequence: Synthetic oligonucleotide
tgctctcagcttcccggccccccct

SEQ ID NO: 3051 - DNA, 25 bp, Artificial Sequence
  Description of Artificial Sequence: Synthetic oligonucleotide
gctctcagcttcccggccccccctt

SEQ ID NO: 3052 - DNA, 25 bp, Artificial Sequence
  Description of Artificial Sequence: Synthetic oligonucleotide
ctctcagcttcccggcccccccttc

SEQ ID NO: 3053 - DNA, 25 bp, Artificial Sequence
  Description of Artificial Sequence: Synthetic oligonucleotide
tctcagcttcccggcccccccttcc

SEQ ID NO: 3054 - DNA, 25 bp, Artificial Sequence
  Description of Artificial Sequence: Synthetic oligonucleotide
ctcagcttcccggcccccccttcca

SEQ ID NO: 3055 - DNA, 25 bp, Artificial Sequence
  Description of Artificial Sequence: Synthetic oligonucleotide
tcagcttcccggcccccccttccag

SEQ ID NO: 3056 - DNA, 25 bp, Artificial Sequence
  Description of Artificial Sequence: Synthetic oligonucleotide
cagcttcccggcccccccttccagg

SEQ ID NO: 3057 - DNA, 25 bp, Artificial Sequence
  Description of Artificial Sequence: Synthetic oligonucleotide
agcttcccggcccccccttccaggc

SEQ ID NO: 3058 - DNA, 25 bp, Artificial Sequence
  Description of Artificial Sequence: Synthetic oligonucleotide
gcttcccggcccccccttccaggcc

SEQ ID NO: 3059 - DNA, 25 bp, Artificial Sequence
  Description of Artificial Sequence: Synthetic oligonucleotide
cttcccggcccccccttccaggccg

SEQ ID NO: 3060 - DNA, 25 bp, Artificial Sequence
  Description of Artificial Sequence: Synthetic oligonucleotide
ttcccggcccccccttccaggccgc

SEQ ID NO: 3061 - DNA, 25 bp, Artificial Sequence
  Description of Artificial Sequence: Synthetic oligonucleotide
tcccggcccccccttccaggccgct

SEQ ID NO: 3062 - DNA, 25 bp, Artificial Sequence
  Description of Artificial Sequence: Synthetic oligonucleotide
cccggcccccccttccaggccgctg

SEQ ID NO: 3063 - DNA, 25 bp, Artificial Sequence
  Description of Artificial Sequence: Synthetic oligonucleotide
ccggcccccccttccaggccgctgc

SEQ ID NO: 3064 - DNA, 25 bp, Artificial Sequence
  Description of Artificial Sequence: Synthetic oligonucleotide
cggcccccccttccaggccgctgcc

SEQ ID NO: 3065 - DNA, 25 bp, Artificial Sequence
  Description of Artificial Sequence: Synthetic oligonucleotide
ggcccccccttccaggccgctgccg

SEQ ID NO: 3066 - DNA, 25 bp, Artificial Sequence
  Description of Artificial Sequence: Synthetic oligonucleotide
gcccccccttccaggccgctgccgc

SEQ ID NO: 3067 - DNA, 25 bp, Artificial Sequence
  Description of Artificial Sequence: Synthetic oligonucleotide
cccccccttccaggccgctgccgcc

SEQ ID NO: 3068 - DNA, 25 bp, Artificial Sequence
  Description of Artificial Sequence: Synthetic oligonucleotide
ccccccttccaggccgctgccgcct

SEQ ID NO: 3069 - DNA, 25 bp, Artificial Sequence
  Description of Artificial Sequence: Synthetic oligonucleotide
cccccttccaggccgctgccgcctg

SEQ ID NO: 3070 - DNA, 25 bp, Artificial Sequence
  Description of Artificial Sequence: Synthetic oligonucleotide
ccccttccaggccgctgccgcctga

SEQ ID NO: 3071 - DNA, 25 bp, Artificial Sequence
  Description of Artificial Sequence: Synthetic oligonucleotide
cccttccaggccgctgccgcctgac

SEQ ID NO: 3072 - DNA, 25 bp, Artificial Sequence
  Description of Artificial Sequence: Synthetic oligonucleotide
ccttccaggccgctgccgcctgacc

SEQ ID NO: 3073 - DNA, 25 bp, Artificial Sequence
  Description of Artificial Sequence: Synthetic oligonucleotide
cttccaggccgctgccgcctgaccc

SEQ ID NO: 3074 - DNA, 25 bp, Artificial Sequence
  Description of Artificial Sequence: Synthetic oligonucleotide
ttccaggccgctgccgcctgaccct

SEQ ID NO: 3075 - DNA, 25 bp, Artificial Sequence
  Description of Artificial Sequence: Synthetic oligonucleotide
tccaggccgctgccgcctgaccctg

SEQ ID NO: 3076 - DNA, 25 bp, Artificial Sequence
  Description of Artificial Sequence: Synthetic oligonucleotide
ccaggccgctgccgcctgaccctgt

SEQ ID NO: 3077 - DNA, 25 bp, Artificial Sequence
  Description of Artificial Sequence: Synthetic oligonucleotide
caggccgctgccgcctgaccctgtg

SEQ ID NO: 3078 - DNA, 25 bp, Artificial Sequence
  Description of Artificial Sequence: Synthetic oligonucleotide
aggccgctgccgcctgaccctgtgt

SEQ ID NO: 3079 - DNA, 25 bp, Artificial Sequence
  Description of Artificial Sequence: Synthetic oligonucleotide
ggccgctgccgcctgaccctgtgtc

SEQ ID NO: 3080 - DNA, 25 bp, Artificial Sequence
  Description of Artificial Sequence: Synthetic oligonucleotide
gccgctgccgcctgaccctgtgtcc

SEQ ID NO: 3081 - DNA, 25 bp, Artificial Sequence
  Description of Artificial Sequence: Synthetic oligonucleotide
ccgctgccgcctgaccctgtgtcca

SEQ ID NO: 3082 - DNA, 25 bp, Artificial Sequence
  Description of Artificial Sequence: Synthetic oligonucleotide
cgctgccgcctgaccctgtgtccaa

SEQ ID NO: 3083 - DNA, 25 bp, Artificial Sequence
  Description of Artificial Sequence: Synthetic oligonucleotide
gctgccgcctgaccctgtgtccaag

SEQ ID NO: 3084 - DNA, 25 bp, Artificial Sequence
  Description of Artificial Sequence: Synthetic oligonucleotide
ctgccgcctgaccctgtgtccaaga

SEQ ID NO: 3085 - DNA, 25 bp, Artificial Sequence
  Description of Artificial Sequence: Synthetic oligonucleotide
tgccgcctgaccctgtgtccaagag

SEQ ID NO: 3086 - DNA, 25 bp, Artificial Sequence
  Description of Artificial Sequence: Synthetic oligonucleotide
gccgcctgaccctgtgtccaagaga

SEQ ID NO: 3087 - DNA, 25 bp, Artificial Sequence
  Description of Artificial Sequence: Synthetic oligonucleotide
ccgcctgaccctgtgtccaagagac

SEQ ID NO: 3088 - DNA, 25 bp, Artificial Sequence
  Description of Artificial Sequence: Synthetic oligonucleotide
cgcctgaccctgtgtccaagagact

SEQ ID NO: 3089 - DNA, 25 bp, Artificial Sequence
  Description of Artificial Sequence: Synthetic oligonucleotide
gcctgaccctgtgtccaagagactc

SEQ ID NO: 3090 - DNA, 25 bp, Artificial Sequence
  Description of Artificial Sequence: Synthetic oligonucleotide
cctgaccctgtgtccaagagactcc

SEQ ID NO: 3091 - DNA, 25 bp, Artificial Sequence
  Description of Artificial Sequence: Synthetic oligonucleotide
ctgaccctgtgtccaagagactcca

SEQ ID NO: 3092 - DNA, 25 bp, Artificial Sequence
  Description of Artificial Sequence: Synthetic oligonucleotide
tgaccctgtgtccaagagactccag

SEQ ID NO: 3093 - DNA, 25 bp, Artificial Sequence
  Description of Artificial Sequence: Synthetic oligonucleotide
gaccctgtgtccaagagactccagg

SEQ ID NO: 3094 - DNA, 25 bp, Artificial Sequence
  Description of Artificial Sequence: Synthetic oligonucleotide
accctgtgtccaagagactccaggt

SEQ ID NO: 3095 - DNA, 25 bp, Artificial Sequence
  Description of Artificial Sequence: Synthetic oligonucleotide
ccctgtgtccaagagactccaggta

SEQ ID NO: 3096 - DNA, 25 bp, Artificial Sequence
  Description of Artificial Sequence: Synthetic oligonucleotide
cctgtgtccaagagactccaggtaa

SEQ ID NO: 3097 - DNA, 25 bp, Artificial Sequence
  Description of Artificial Sequence: Synthetic oligonucleotide
ctgtgtccaagagactccaggtaaa

SEQ ID NO: 3098 - DNA, 25 bp, Artificial Sequence
  Description of Artificial Sequence: Synthetic oligonucleotide
tgtgtccaagagactccaggtaaat

SEQ ID NO: 3099 - DNA, 25 bp, Artificial Sequence
  Description of Artificial Sequence: Synthetic oligonucleotide
gtgtccaagagactccaggtaaatc

SEQ ID NO: 3100 - DNA, 25 bp, Artificial Sequence
  Description of Artificial Sequence: Synthetic oligonucleotide
tgtccaagagactccaggtaaatct

SEQ ID NO: 3101 - DNA, 25 bp, Artificial Sequence
  Description of Artificial Sequence: Synthetic oligonucleotide
gtccaagagactccaggtaaatctg

SEQ ID NO: 3102 - DNA, 25 bp, Artificial Sequence
  Description of Artificial Sequence: Synthetic oligonucleotide
tccaagagactccaggtaaatctgg

SEQ ID NO: 3103 - DNA, 25 bp, Artificial Sequence
  Description of Artificial Sequence: Synthetic oligonucleotide
ccaagagactccaggtaaatctggg

SEQ ID NO: 3104 - DNA, 25 bp, Artificial Sequence
  Description of Artificial Sequence: Synthetic oligonucleotide
caagagactccaggtaaatctgggc

SEQ ID NO: 3105 - DNA, 25 bp, Artificial Sequence
  Description of Artificial Sequence: Synthetic oligonucleotide
aagagactccaggtaaatctgggcc

SEQ ID NO: 3106 - DNA, 25 bp, Artificial Sequence
  Description of Artificial Sequence: Synthetic oligonucleotide
agagactccaggtaaatctgggcca

SEQ ID NO: 3107 - DNA, 25 bp, Artificial Sequence
  Description of Artificial Sequence: Synthetic oligonucleotide
gagactccaggtaaatctgggccag

SEQ ID NO: 3108 - DNA, 25 bp, Artificial Sequence
  Description of Artificial Sequence: Synthetic oligonucleotide
agactccaggtaaatctgggccagg

SEQ ID NO: 3109 - DNA, 25 bp, Artificial Sequence
  Description of Artificial Sequence: Synthetic oligonucleotide
gactccaggtaaatctgggccaggg

SEQ ID NO: 3110 - DNA, 25 bp, Artificial Sequence
  Description of Artificial Sequence: Synthetic oligonucleotide
actccaggtaaatctgggccagggc

SEQ ID NO: 3111 - DNA, 25 bp, Artificial Sequence
  Description of Artificial Sequence: Synthetic oligonucleotide
ctccaggtaaatctgggccagggcc

SEQ ID NO: 3112 - DNA, 25 bp, Artificial Sequence
  Description of Artificial Sequence: Synthetic oligonucleotide
tccaggtaaatctgggccagggccc

SEQ ID NO: 3113 - DNA, 25 bp, Artificial Sequence
  Description of Artificial Sequence: Synthetic oligonucleotide
ccaggtaaatctgggccagggcccg

SEQ ID NO: 3114 - DNA, 25 bp, Artificial Sequence
  Description of Artificial Sequence: Synthetic oligonucleotide
caggtaaatctgggccagggcccgc

SEQ ID NO: 3115 - DNA, 25 bp, Artificial Sequence
  Description of Artificial Sequence: Synthetic oligonucleotide
aggtaaatctgggccagggcccgcc

SEQ ID NO: 3116 - DNA, 25 bp, Artificial Sequence
  Description of Artificial Sequence: Synthetic oligonucleotide
ggtaaatctgggccagggcccgccc

SEQ ID NO: 3117 - DNA, 25 bp, Artificial Sequence
  Description of Artificial Sequence: Synthetic oligonucleotide
gtaaatctgggccagggcccgccct

SEQ ID NO: 3118 - DNA, 25 bp, Artificial Sequence
  Description of Artificial Sequence: Synthetic oligonucleotide
taaatctgggccagggcccgccctg

SEQ ID NO: 3119 - DNA, 25 bp, Artificial Sequence
  Description of Artificial Sequence: Synthetic oligonucleotide
aaatctgggccagggcccgccctga

SEQ ID NO: 3120 - DNA, 25 bp, Artificial Sequence
  Description of Artificial Sequence: Synthetic oligonucleotide
aatctgggccagggcccgccctgag

SEQ ID NO: 3121 - DNA, 25 bp, Artificial Sequence
  Description of Artificial Sequence: Synthetic oligonucleotide
atctgggccagggcccgccctgagc

SEQ ID NO: 3122 - DNA, 25 bp, Artificial Sequence
  Description of Artificial Sequence: Synthetic oligonucleotide
tctgggccagggcccgccctgagcc

SEQ ID NO: 3123 - DNA, 25 bp, Artificial Sequence
  Description of Artificial Sequence: Synthetic oligonucleotide
ctgggccagggcccgccctgagcca

SEQ ID NO: 3124 - DNA, 25 bp, Artificial Sequence
  Description of Artificial Sequence: Synthetic oligonucleotide
tgggccagggcccgccctgagccaa

SEQ ID NO: 3125 - DNA, 25 bp, Artificial Sequence
  Description of Artificial Sequence: Synthetic oligonucleotide
gggccagggcccgccctgagccaag

SEQ ID NO: 3126 - DNA, 25 bp, Artificial Sequence
  Description of Artificial Sequence: Synthetic oligonucleotide
ggccagggcccgccctgagccaagg

SEQ ID NO: 3127 - DNA, 25 bp, Artificial Sequence
  Description of Artificial Sequence: Synthetic oligonucleotide
gccagggcccgccctgagccaaggc

SEQ ID NO: 3128 - DNA, 25 bp, Artificial Sequence
  Description of Artificial Sequence: Synthetic oligonucleotide
ccagggcccgccctgagccaaggca

SEQ ID NO: 3129 - DNA, 25 bp, Artificial Sequence
  Description of Artificial Sequence: Synthetic oligonucleotide
cagggcccgccctgagccaaggcag

SEQ ID NO: 3130 - DNA, 25 bp, Artificial Sequence
  Description of Artificial Sequence: Synthetic oligonucleotide
agggcccgccctgagccaaggcagg

SEQ ID NO: 3131 - DNA, 25 bp, Artificial Sequence
  Description of Artificial Sequence: Synthetic oligonucleotide
gggcccgccctgagccaaggcaggt

SEQ ID NO: 3132 - DNA, 25 bp, Artificial Sequence
  Description of Artificial Sequence: Synthetic oligonucleotide
ggcccgccctgagccaaggcaggtg

SEQ ID NO: 3133 - DNA, 25 bp, Artificial Sequence
  Description of Artificial Sequence: Synthetic oligonucleotide
gcccgccctgagccaaggcaggtgg

SEQ ID NO: 3134 - DNA, 25 bp, Artificial Sequence
  Description of Artificial Sequence: Synthetic oligonucleotide
cccgccctgagccaaggcaggtggg

SEQ ID NO: 3135 - DNA, 25 bp, Artificial Sequence
  Description of Artificial Sequence: Synthetic oligonucleotide
ccgccctgagccaaggcaggtggga

SEQ ID NO: 3136 - DNA, 25 bp, Artificial Sequence
  Description of Artificial Sequence: Synthetic oligonucleotide
cgccctgagccaaggcaggtgggag

SEQ ID NO: 3137 - DNA, 25 bp, Artificial Sequence
  Description of Artificial Sequence: Synthetic oligonucleotide
gccctgagccaaggcaggtgggagg

SEQ ID NO: 3138 - DNA, 25 bp, Artificial Sequence
  Description of Artificial Sequence: Synthetic oligonucleotide
ccctgagccaaggcaggtgggaggc

SEQ ID NO: 3139 - DNA, 25 bp, Artificial Sequence
  Description of Artificial Sequence: Synthetic oligonucleotide
cctgagccaaggcaggtgggaggct

SEQ ID NO: 3140 - DNA, 25 bp, Artificial Sequence
  Description of Artificial Sequence: Synthetic oligonucleotide
ctgagccaaggcaggtgggaggctt

SEQ ID NO: 3141 - DNA, 25 bp, Artificial Sequence
  Description of Artificial Sequence: Synthetic oligonucleotide
tgagccaaggcaggtgggaggcttg

SEQ ID NO: 3142 - DNA, 25 bp, Artificial Sequence
  Description of Artificial Sequence: Synthetic oligonucleotide
gagccaaggcaggtgggaggcttgg

SEQ ID NO: 3143 - DNA, 25 bp, Artificial Sequence
  Description of Artificial Sequence: Synthetic oligonucleotide
ctctctctccccaccccacatcccc

SEQ ID NO: 3144 - DNA, 25 bp, Artificial Sequence
  Description of Artificial Sequence: Synthetic oligonucleotide
tctctctccccaccccacatcccca

SEQ ID NO: 3145 - DNA, 25 bp, Artificial Sequence
  Description of Artificial Sequence: Synthetic oligonucleotide
ctctctccccaccccacatccccat

SEQ ID NO: 3146 - DNA, 25 bp, Artificial Sequence
  Description of Artificial Sequence: Synthetic oligonucleotide
tctctccccaccccacatccccatt

SEQ ID NO: 3147 - DNA, 25 bp, Artificial Sequence
  Description of Artificial Sequence: Synthetic oligonucleotide
ctctccccaccccacatccccattc

SEQ ID NO: 3148 - DNA, 25 bp, Artificial Sequence
  Description of Artificial Sequence: Synthetic oligonucleotide
tctccccaccccacatccccattct

SEQ ID NO: 3149 - DNA, 25 bp, Artificial Sequence
  Description of Artificial Sequence: Synthetic oligonucleotide
ctccccaccccacatccccattctt

SEQ ID NO: 3150 - DNA, 25 bp, Artificial Sequence
  Description of Artificial Sequence: Synthetic oligonucleotide
tccccaccccacatccccattcttt

SEQ ID NO: 3151 - DNA, 25 bp, Artificial Sequence
  Description of Artificial Sequence: Synthetic oligonucleotide
ccccaccccacatccccattctttt

SEQ ID NO: 3152 - DNA, 25 bp, Artificial Sequence
  Description of Artificial Sequence: Synthetic oligonucleotide
cccaccccacatccccattcttttg

SEQ ID NO: 3153 - DNA, 25 bp, Artificial Sequence
  Description of Artificial Sequence: Synthetic oligonucleotide
ccaccccacatccccattcttttga

SEQ ID NO: 3154 - DNA, 25 bp, Artificial Sequence
  Description of Artificial Sequence: Synthetic oligonucleotide
caccccacatccccattcttttgat

SEQ ID NO: 3155 - DNA, 25 bp, Artificial Sequence
  Description of Artificial Sequence: Synthetic oligonucleotide
accccacatccccattcttttgatt

SEQ ID NO: 3156 - DNA, 25 bp, Artificial Sequence
  Description of Artificial Sequence: Synthetic oligonucleotide
ccccacatccccattcttttgattt

SEQ ID NO: 3157 - DNA, 25 bp, Artificial Sequence
  Description of Artificial Sequence: Synthetic oligonucleotide
cccacatccccattcttttgatttt

SEQ ID NO: 3158 - DNA, 25 bp, Artificial Sequence
  Description of Artificial Sequence: Synthetic oligonucleotide
ccacatccccattcttttgatttta

SEQ ID NO: 3159 - DNA, 25 bp, Artificial Sequence
  Description of Artificial Sequence: Synthetic oligonucleotide
cacatccccattcttttgattttat

SEQ ID NO: 3160 - DNA, 25 bp, Artificial Sequence
  Description of Artificial Sequence: Synthetic oligonucleotide
acatccccattcttttgattttatc

SEQ ID NO: 3161 - DNA, 25 bp, Artificial Sequence
  Description of Artificial Sequence: Synthetic oligonucleotide
catccccattcttttgattttatct

SEQ ID NO: 3162 - DNA, 25 bp, Artificial Sequence
  Description of Artificial Sequence: Synthetic oligonucleotide
atccccattcttttgattttatctg

SEQ ID NO: 3163 - DNA, 25 bp, Artificial Sequence
  Description of Artificial Sequence: Synthetic oligonucleotide
tccccattcttttgattttatctgg

SEQ ID NO: 3164 - DNA, 25 bp, Artificial Sequence
  Description of Artificial Sequence: Synthetic oligonucleotide
ccccattcttttgattttatctggc

SEQ ID NO: 3165 - DNA, 25 bp, Artificial Sequence
  Description of Artificial Sequence: Synthetic oligonucleotide
cccattcttttgattttatctggcc

SEQ ID NO: 3166 - DNA, 25 bp, Artificial Sequence
  Description of Artificial Sequence: Synthetic oligonucleotide
ccattcttttgattttatctggcca

SEQ ID NO: 3167 - DNA, 25 bp, Artificial Sequence
  Description of Artificial Sequence: Synthetic oligonucleotide
cattcttttgattttatctggccat

SEQ ID NO: 3168 - DNA, 25 bp, Artificial Sequence
  Description of Artificial Sequence: Synthetic oligonucleotide
attcttttgattttatctggccata

SEQ ID NO: 3169 - DNA, 25 bp, Artificial Sequence
  Description of Artificial Sequence: Synthetic oligonucleotide
ttcttttgattttatctggccatag

SEQ ID NO: 3170 - DNA, 25 bp, Artificial Sequence
  Description of Artificial Sequence: Synthetic oligonucleotide
tcttttgattttatctggccataga

SEQ ID NO: 3171 - DNA, 25 bp, Artificial Sequence
  Description of Artificial Sequence: Synthetic oligonucleotide
cttttgattttatctggccatagag

SEQ ID NO: 3172 - DNA, 25 bp, Artificial Sequence
  Description of Artificial Sequence: Synthetic oligonucleotide
ttttgattttatctggccatagaga

SEQ ID NO: 3173 - DNA, 25 bp, Artificial Sequence
  Description of Artificial Sequence: Synthetic oligonucleotide
tttgattttatctggccatagagag

SEQ ID NO: 3174 - DNA, 25 bp, Artificial Sequence
  Description of Artificial Sequence: Synthetic oligonucleotide
ttgattttatctggccatagagagc

SEQ ID NO: 3175 - DNA, 25 bp, Artificial Sequence
  Description of Artificial Sequence: Synthetic oligonucleotide
tgattttatctggccatagagagca

SEQ ID NO: 3176 - DNA, 25 bp, Artificial Sequence
  Description of Artificial Sequence: Synthetic oligonucleotide
gattttatctggccatagagagcag

SEQ ID NO: 3177 - DNA, 25 bp, Artificial Sequence
  Description of Artificial Sequence: Synthetic oligonucleotide
attttatctggccatagagagcagg

SEQ ID NO: 3178 - DNA, 25 bp, Artificial Sequence
  Description of Artificial Sequence: Synthetic oligonucleotide
ttttatctggccatagagagcaggg

SEQ ID NO: 3179 - DNA, 25 bp, Artificial Sequence
  Description of Artificial Sequence: Synthetic oligonucleotide
tttatctggccatagagagcagggc

SEQ ID NO: 3180 - DNA, 25 bp, Artificial Sequence
  Description of Artificial Sequence: Synthetic oligonucleotide
ttatctggccatagagagcagggct

SEQ ID NO: 3181 - DNA, 25 bp, Artificial Sequence
  Description of Artificial Sequence: Synthetic oligonucleotide
tatctggccatagagagcagggctg

SEQ ID NO: 3182 - DNA, 25 bp, Artificial Sequence
  Description of Artificial Sequence: Synthetic oligonucleotide
atctggccatagagagcagggctga

SEQ ID NO: 3183 - DNA, 25 bp, Artificial Sequence
  Description of Artificial Sequence: Synthetic oligonucleotide
tctggccatagagagcagggctgag

SEQ ID NO: 3184 - DNA, 25 bp, Artificial Sequence
  Description of Artificial Sequence: Synthetic oligonucleotide
ctggccatagagagcagggctgagg

SEQ ID NO: 3185 - DNA, 25 bp, Artificial Sequence
  Description of Artificial Sequence: Synthetic oligonucleotide
tggccatagagagcagggctgaggg

SEQ ID NO: 3186 - DNA, 25 bp, Artificial Sequence
  Description of Artificial Sequence: Synthetic oligonucleotide
ggccatagagagcagggctgaggga

SEQ ID NO: 3187 - DNA, 25 bp, Artificial Sequence
  Description of Artificial Sequence: Synthetic oligonucleotide
gccatagagagcagggctgagggag

SEQ ID NO: 3188 - DNA, 25 bp, Artificial Sequence
  Description of Artificial Sequence: Synthetic oligonucleotide
ccatagagagcagggctgagggagg

SEQ ID NO: 3189 - DNA, 25 bp, Artificial Sequence
  Description of Artificial Sequence: Synthetic oligonucleotide
catagagagcagggctgagggaggg

SEQ ID NO: 3190 - DNA, 25 bp, Artificial Sequence
  Description of Artificial Sequence: Synthetic oligonucleotide
atagagagcagggctgagggagggc

SEQ ID NO: 3191 - DNA, 25 bp, Artificial Sequence
  Description of Artificial Sequence: Synthetic oligonucleotide
tagagagcagggctgagggagggct

SEQ ID NO: 3192 - DNA, 25 bp, Artificial Sequence
  Description of Artificial Sequence: Synthetic oligonucleotide
agagagcagggctgagggagggctc

SEQ ID NO: 3193 - DNA, 25 bp, Artificial Sequence
  Description of Artificial Sequence: Synthetic oligonucleotide
gagagcagggctgagggagggctcc

SEQ ID NO: 3194 - DNA, 25 bp, Artificial Sequence
  Description of Artificial Sequence: Synthetic oligonucleotide
agagcagggctgagggagggctccg

SEQ ID NO: 3195 - DNA, 25 bp, Artificial Sequence
  Description of Artificial Sequence: Synthetic oligonucleotide
gagcagggctgagggagggctccga

SEQ ID NO: 3196 - DNA, 25 bp, Artificial Sequence
  Description of Artificial Sequence: Synthetic oligonucleotide
agcagggctgagggagggctccgag

SEQ ID NO: 3197 - DNA, 25 bp, Artificial Sequence
  Description of Artificial Sequence: Synthetic oligonucleotide
gcagggctgagggagggctccgagg

SEQ ID NO: 3198 - DNA, 25 bp, Artificial Sequence
  Description of Artificial Sequence: Synthetic oligonucleotide
cagggctgagggagggctccgagga

SEQ ID NO: 3199 - DNA, 25 bp, Artificial Sequence
  Description of Artificial Sequence: Synthetic oligonucleotide
agggctgagggagggctccgaggag

SEQ ID NO: 3200 - DNA, 25 bp, Artificial Sequence
  Description of Artificial Sequence: Synthetic oligonucleotide
gggctgagggagggctccgaggaga

SEQ ID NO: 3201 - DNA, 25 bp, Artificial Sequence
  Description of Artificial Sequence: Synthetic oligonucleotide
ggctgagggagggctccgaggagaa

SEQ ID NO: 3202 - DNA, 25 bp, Artificial Sequence
  Description of Artificial Sequence: Synthetic oligonucleotide
gctgagggagggctccgaggagaaa

SEQ ID NO: 3203 - DNA, 25 bp, Artificial Sequence
  Description of Artificial Sequence: Synthetic oligonucleotide
ctgagggagggctccgaggagaaag

SEQ ID NO: 3204 - DNA, 25 bp, Artificial Sequence
  Description of Artificial Sequence: Synthetic oligonucleotide
tgagggagggctccgaggagaaagt

SEQ ID NO: 3205 - DNA, 25 bp, Artificial Sequence
  Description of Artificial Sequence: Synthetic oligonucleotide
gagggagggctccgaggagaaagtc

SEQ ID NO: 3206 - DNA, 25 bp, Artificial Sequence
  Description of Artificial Sequence: Synthetic oligonucleotide
agggagggctccgaggagaaagtca

SEQ ID NO: 3207 - DNA, 25 bp, Artificial Sequence
  Description of Artificial Sequence: Synthetic oligonucleotide
gggagggctccgaggagaaagtcaa

SEQ ID NO: 3208 - DNA, 25 bp, Artificial Sequence
  Description of Artificial Sequence: Synthetic oligonucleotide
ggagggctccgaggagaaagtcaaa

SEQ ID NO: 3209 - DNA, 25 bp, Artificial Sequence
  Description of Artificial Sequence: Synthetic oligonucleotide
gagggctccgaggagaaagtcaaac

SEQ ID NO: 3210 - DNA, 25 bp, Artificial Sequence
  Description of Artificial Sequence: Synthetic oligonucleotide
agggctccgaggagaaagtcaaacc

SEQ ID NO: 3211 - DNA, 25 bp, Artificial Sequence
  Description of Artificial Sequence: Synthetic oligonucleotide
gggctccgaggagaaagtcaaacca

SEQ ID NO: 3212 - DNA, 25 bp, Artificial Sequence
  Description of Artificial Sequence: Synthetic oligonucleotide
ggctccgaggagaaagtcaaaccac

SEQ ID NO: 3213 - DNA, 25 bp, Artificial Sequence
  Description of Artificial Sequence: Synthetic oligonucleotide
gctccgaggagaaagtcaaaccacc

SEQ ID NO: 3214 - DNA, 25 bp, Artificial Sequence
  Description of Artificial Sequence: Synthetic oligonucleotide
ctccgaggagaaagtcaaaccacca

SEQ ID NO: 3215 - DNA, 25 bp, Artificial Sequence
  Description of Artificial Sequence: Synthetic oligonucleotide
tccgaggagaaagtcaaaccaccac

SEQ ID NO: 3216 - DNA, 25 bp, Artificial Sequence
  Description of Artificial Sequence: Synthetic oligonucleotide
ccgaggagaaagtcaaaccaccacg

SEQ ID NO: 3217 - DNA, 25 bp, Artificial Sequence
  Description of Artificial Sequence: Synthetic oligonucleotide
cgaggagaaagtcaaaccaccacgt

SEQ ID NO: 3218 - DNA, 25 bp, Artificial Sequence
  Description of Artificial Sequence: Synthetic oligonucleotide
gaggagaaagtcaaaccaccacgtc

SEQ ID NO: 3219 - DNA, 25 bp, Artificial Sequence
  Description of Artificial Sequence: Synthetic oligonucleotide
aggagaaagtcaaaccaccacgtcc

SEQ ID NO: 3220 - DNA, 25 bp, Artificial Sequence
  Description of Artificial Sequence: Synthetic oligonucleotide
ggagaaagtcaaaccaccacgtccc

SEQ ID NO: 3221 - DNA, 25 bp, Artificial Sequence
  Description of Artificial Sequence: Synthetic oligonucleotide
gagaaagtcaaaccaccacgtcccc

SEQ ID NO: 3222 - DNA, 25 bp, Artificial Sequence
  Description of Artificial Sequence: Synthetic oligonucleotide
agaaagtcaaaccaccacgtccccg

SEQ ID NO: 3223 - DNA, 25 bp, Artificial Sequence
  Description of Artificial Sequence: Synthetic oligonucleotide
gaaagtcaaaccaccacgtccccgg

SEQ ID NO: 3224 - DNA, 25 bp, Artificial Sequence
  Description of Artificial Sequence: Synthetic oligonucleotide
aaagtcaaaccaccacgtccccggg

SEQ ID NO: 3225 - DNA, 25 bp, Artificial Sequence
  Description of Artificial Sequence: Synthetic oligonucleotide
aagtcaaaccaccacgtccccgggc

SEQ ID NO: 3226 - DNA, 25 bp, Artificial Sequence
  Description of Artificial Sequence: Synthetic oligonucleotide
agtcaaaccaccacgtccccgggcc

SEQ ID NO: 3227 - DNA, 25 bp, Artificial Sequence
  Description of Artificial Sequence: Synthetic oligonucleotide
gtcaaaccaccacgtccccgggccc

SEQ ID NO: 3228 - DNA, 25 bp, Artificial Sequence
  Description of Artificial Sequence: Synthetic oligonucleotide
tcaaaccaccacgtccccgggcccc

SEQ ID NO: 3229 - DNA, 25 bp, Artificial Sequence
  Description of Artificial Sequence: Synthetic oligonucleotide
caaaccaccacgtccccgggcccca

SEQ ID NO: 3230 - DNA, 25 bp, Artificial Sequence
  Description of Artificial Sequence: Synthetic oligonucleotide
aaaccaccacgtccccgggccccag

SEQ ID NO: 3231 - DNA, 25 bp, Artificial Sequence
  Description of Artificial Sequence: Synthetic oligonucleotide
aaccaccacgtccccgggccccaga

SEQ ID NO: 3232 - DNA, 25 bp, Artificial Sequence
  Description of Artificial Sequence: Synthetic oligonucleotide
accaccacgtccccgggccccagag

SEQ ID NO: 3233 - DNA, 25 bp, Artificial Sequence
  Description of Artificial Sequence: Synthetic oligonucleotide
ccaccacgtccccgggccccagaga

SEQ ID NO: 3234 - DNA, 25 bp, Artificial Sequence
  Description of Artificial Sequence: Synthetic oligonucleotide
caccacgtccccgggccccagagag

SEQ ID NO: 3235 - DNA, 25 bp, Artificial Sequence
  Description of Artificial Sequence: Synthetic oligonucleotide
accacgtccccgggccccagagagt

SEQ ID NO: 3236 - DNA, 25 bp, Artificial Sequence
  Description of Artificial Sequence: Synthetic oligonucleotide
ccacgtccccgggccccagagagtg

SEQ ID NO: 3237 - DNA, 25 bp, Artificial Sequence
  Description of Artificial Sequence: Synthetic oligonucleotide
cacgtccccgggccccagagagtga

SEQ ID NO: 3238 - DNA, 25 bp, Artificial Sequence
  Description of Artificial Sequence: Synthetic oligonucleotide
acgtccccgggccccagagagtgac

SEQ ID NO: 3239 - DNA, 25 bp, Artificial Sequence
  Description of Artificial Sequence: Synthetic oligonucleotide
cgtccccgggccccagagagtgaca

SEQ ID NO: 3240 - DNA, 25 bp, Artificial Sequence
  Description of Artificial Sequence: Synthetic oligonucleotide
gtccccgggccccagagagtgacac

SEQ ID NO: 3241 - DNA, 25 bp, Artificial Sequence
  Description of Artificial Sequence: Synthetic oligonucleotide
tccccgggccccagagagtgacaca

SEQ ID NO: 3242 - DNA, 25 bp, Artificial Sequence
  Description of Artificial Sequence: Synthetic oligonucleotide
ccccgggccccagagagtgacacag

SEQ ID NO: 3243 - DNA, 25 bp, Artificial Sequence
  Description of Artificial Sequence: Synthetic oligonucleotide
cccgggccccagagagtgacacagg

SEQ ID NO: 3244 - DNA, 25 bp, Artificial Sequence
  Description of Artificial Sequence: Synthetic oligonucleotide
ccgggccccagagagtgacacaggc

SEQ ID NO: 3245 - DNA, 25 bp, Artificial Sequence
  Description of Artificial Sequence: Synthetic oligonucleotide
cgggccccagagagtgacacaggcg

SEQ ID NO: 3246 - DNA, 25 bp, Artificial Sequence
  Description of Artificial Sequence: Synthetic oligonucleotide
gggccccagagagtgacacaggcga

SEQ ID NO: 3247 - DNA, 25 bp, Artificial Sequence
  Description of Artificial Sequence: Synthetic oligonucleotide
ggccccagagagtgacacaggcgat

SEQ ID NO: 3248 - DNA, 25 bp, Artificial Sequence
  Description of Artificial Sequence: Synthetic oligonucleotide
gccccagagagtgacacaggcgatg

SEQ ID NO: 3249 - DNA, 25 bp, Artificial Sequence
  Description of Artificial Sequence: Synthetic oligonucleotide
ccccagagagtgacacaggcgatga

SEQ ID NO: 3250 - DNA, 25 bp, Artificial Sequence
  Description of Artificial Sequence: Synthetic oligonucleotide
cccagagagtgacacaggcgatgag

SEQ ID NO: 3251 - DNA, 25 bp, Artificial Sequence
  Description of Artificial Sequence: Synthetic oligonucleotide
ccagagagtgacacaggcgatgagg

SEQ ID NO: 3252 - DNA, 25 bp, Artificial Sequence
  Description of Artificial Sequence: Synthetic oligonucleotide
cagagagtgacacaggcgatgagga

SEQ ID NO: 3253 - DNA, 25 bp, Artificial Sequence
  Description of Artificial Sequence: Synthetic oligonucleotide
agagagtgacacaggcgatgaggac

SEQ ID NO: 3254 - DNA, 25 bp, Artificial Sequence
  Description of Artificial Sequence: Synthetic oligonucleotide
gagagtgacacaggcgatgaggacc

SEQ ID NO: 3255 - DNA, 25 bp, Artificial Sequence
  Description of Artificial Sequence: Synthetic oligonucleotide
agagtgacacaggcgatgaggacca

SEQ ID NO: 3256 - DNA, 25 bp, Artificial Sequence
  Description of Artificial Sequence: Synthetic oligonucleotide
gagtgacacaggcgatgaggaccag

SEQ ID NO: 3257 - DNA, 25 bp, Artificial Sequence
  Description of Artificial Sequence: Synthetic oligonucleotide
agtgacacaggcgatgaggaccagg

SEQ ID NO: 3258 - DNA, 25 bp, Artificial Sequence
  Description of Artificial Sequence: Synthetic oligonucleotide
gtgacacaggcgatgaggaccagga

SEQ ID NO: 3259 - DNA, 25 bp, Artificial Sequence
  Description of Artificial Sequence: Synthetic oligonucleotide
tgacacaggcgatgaggaccaggac

SEQ ID NO: 3260 - DNA, 25 bp, Artificial Sequence
  Description of Artificial Sequence: Synthetic oligonucleotide
gacacaggcgatgaggaccaggacc

SEQ ID NO: 3261 - DNA, 25 bp, Artificial Sequence
  Description of Artificial Sequence: Synthetic oligonucleotide
acacaggcgatgaggaccaggacca

SEQ ID NO: 3262 - DNA, 25 bp, Artificial Sequence
  Description of Artificial Sequence: Synthetic oligonucleotide
cacaggcgatgaggaccaggaccag

SEQ ID NO: 3263 - DNA, 25 bp, Artificial Sequence
  Description of Artificial Sequence: Synthetic oligonucleotide
acaggcgatgaggaccaggaccagg

SEQ ID NO: 3264 - DNA, 25 bp, Artificial Sequence
  Description of Artificial Sequence: Synthetic oligonucleotide
caggcgatgaggaccaggaccagga

SEQ ID NO: 3265 - DNA, 25 bp, Artificial Sequence
  Description of Artificial Sequence: Synthetic oligonucleotide
aggcgatgaggaccaggaccaggag

SEQ ID NO: 3266 - DNA, 25 bp, Artificial Sequence
  Description of Artificial Sequence: Synthetic oligonucleotide
ggcgatgaggaccaggaccaggaga

SEQ ID NO: 3267 - DNA, 25 bp, Artificial Sequence
  Description of Artificial Sequence: Synthetic oligonucleotide
gcgatgaggaccaggaccaggagag

SEQ ID NO: 3268 - DNA, 25 bp, Artificial Sequence
  Description of Artificial Sequence: Synthetic oligonucleotide
cgatgaggaccaggaccaggagagg

SEQ ID NO: 3269 - DNA, 25 bp, Artificial Sequence
  Description of Artificial Sequence: Synthetic oligonucleotide
gatgaggaccaggaccaggagaggg

SEQ ID NO: 3270 - DNA, 25 bp, Artificial Sequence
  Description of Artificial Sequence: Synthetic oligonucleotide
atgaggaccaggaccaggagaggga

SEQ ID NO: 3271 - DNA, 25 bp, Artificial Sequence
  Description of Artificial Sequence: Synthetic oligonucleotide
tgaggaccaggaccaggagagggac

SEQ ID NO: 3272 - DNA, 25 bp, Artificial Sequence
  Description of Artificial Sequence: Synthetic oligonucleotide
gaggaccaggaccaggagagggaca

SEQ ID NO: 3273 - DNA, 25 bp, Artificial Sequence
  Description of Artificial Sequence: Synthetic oligonucleotide
aggaccaggaccaggagagggacac

SEQ ID NO: 3274 - DNA, 25 bp, Artificial Sequence
  Description of Artificial Sequence: Synthetic oligonucleotide
ggaccaggaccaggagagggacacg

SEQ ID NO: 3275 - DNA, 25 bp, Artificial Sequence
  Description of Artificial Sequence: Synthetic oligonucleotide
gaccaggaccaggagagggacacgg

SEQ ID NO: 3276 - DNA, 25 bp, Artificial Sequence
  Description of Artificial Sequence: Synthetic oligonucleotide
accaggaccaggagagggacacggt

SEQ ID NO: 3277 - DNA, 25 bp, Artificial Sequence
  Description of Artificial Sequence: Synthetic oligonucleotide
ccaggaccaggagagggacacggtg

SEQ ID NO: 3278 - DNA, 25 bp, Artificial Sequence
  Description of Artificial Sequence: Synthetic oligonucleotide
caggaccaggagagggacacggtgt

SEQ ID NO: 3279 - DNA, 25 bp, Artificial Sequence
  Description of Artificial Sequence: Synthetic oligonucleotide
aggaccaggagagggacacggtgtt

SEQ ID NO: 3280 - DNA, 25 bp, Artificial Sequence
  Description of Artificial Sequence: Synthetic oligonucleotide
ggaccaggagagggacacggtgttc

SEQ ID NO: 3281 - DNA, 25 bp, Artificial Sequence
  Description of Artificial Sequence: Synthetic oligonucleotide
gaccaggagagggacacggtgttcc

SEQ ID NO: 3282 - DNA, 25 bp, Artificial Sequence
  Description of Artificial Sequence: Synthetic oligonucleotide
accaggagagggacacggtgttcct

SEQ ID NO: 3283 - DNA, 25 bp, Artificial Sequence
  Description of Artificial Sequence: Synthetic oligonucleotide
ccaggagagggacacggtgttcctg

SEQ ID NO: 3284 - DNA, 25 bp, Artificial Sequence
  Description of Artificial Sequence: Synthetic oligonucleotide
caggagagggacacggtgttcctga

SEQ ID NO: 3285 - DNA, 25 bp, Artificial Sequence
  Description of Artificial Sequence: Synthetic oligonucleotide
aggagagggacacggtgttcctgaa

SEQ ID NO: 3286 - DNA, 25 bp, Artificial Sequence
  Description of Artificial Sequence: Synthetic oligonucleotide
ggagagggacacggtgttcctgaag

SEQ ID NO: 3287 - DNA, 25 bp, Artificial Sequence
  Description of Artificial Sequence: Synthetic oligonucleotide
gagagggacacggtgttcctgaagg

SEQ ID NO: 3288 - DNA, 25 bp, Artificial Sequence
  Description of Artificial Sequence: Synthetic oligonucleotide
agagggacacggtgttcctgaagga

SEQ ID NO: 3289 - DNA, 25 bp, Artificial Sequence
  Description of Artificial Sequence: Synthetic oligonucleotide
gagggacacggtgttcctgaaggac

SEQ ID NO: 3290 - DNA, 25 bp, Artificial Sequence
  Description of Artificial Sequence: Synthetic oligonucleotide
agggacacggtgttcctgaaggaca

SEQ ID NO: 3291 - DNA, 25 bp, Artificial Sequence
  Description of Artificial Sequence: Synthetic oligonucleotide
gggacacggtgttcctgaaggacaa

SEQ ID NO: 3292 - DNA, 25 bp, Artificial Sequence
  Description of Artificial Sequence: Synthetic oligonucleotide
ggacacggtgttcctgaaggacaac

SEQ ID NO: 3293 - DNA, 25 bp, Artificial Sequence
  Description of Artificial Sequence: Synthetic oligonucleotide
gacacggtgttcctgaaggacaacc

SEQ ID NO: 3294 - DNA, 25 bp, Artificial Sequence
  Description of Artificial Sequence: Synthetic oligonucleotide
acacggtgttcctgaaggacaacca

SEQ ID NO: 3295 - DNA, 25 bp, Artificial Sequence
  Description of Artificial Sequence: Synthetic oligonucleotide
cacggtgttcctgaaggacaaccac

SEQ ID NO: 3296 - DNA, 25 bp, Artificial Sequence
  Description of Artificial Sequence: Synthetic oligonucleotide
acggtgttcctgaaggacaaccacc

SEQ ID NO: 3297 - DNA, 25 bp, Artificial Sequence
  Description of Artificial Sequence: Synthetic oligonucleotide
cggtgttcctgaaggacaaccacct

SEQ ID NO: 3298 - DNA, 25 bp, Artificial Sequence
  Description of Artificial Sequence: Synthetic oligonucleotide
ggtgttcctgaaggacaaccacctg

SEQ ID NO: 3299 - DNA, 25 bp, Artificial Sequence
  Description of Artificial Sequence: Synthetic oligonucleotide
gtgttcctgaaggacaaccacctgg

SEQ ID NO: 3300 - DNA, 25 bp, Artificial Sequence
  Description of Artificial Sequence: Synthetic oligonucleotide
tgttcctgaaggacaaccacctggc

SEQ ID NO: 3301 - DNA, 25 bp, Artificial Sequence
  Description of Artificial Sequence: Synthetic oligonucleotide
gttcctgaaggacaaccacctggcc

SEQ ID NO: 3302 - DNA, 25 bp, Artificial Sequence
  Description of Artificial Sequence: Synthetic oligonucleotide
ttcctgaaggacaaccacctggcca

SEQ ID NO: 3303 - DNA, 25 bp, Artificial Sequence
  Description of Artificial Sequence: Synthetic oligonucleotide
tcctgaaggacaaccacctggccat

SEQ ID NO: 3304 - DNA, 25 bp, Artificial Sequence
  Description of Artificial Sequence: Synthetic oligonucleotide
cctgaaggacaaccacctggccatt

SEQ ID NO: 3305 - DNA, 25 bp, Artificial Sequence
  Description of Artificial Sequence: Synthetic oligonucleotide
ctgaaggacaaccacctggccattg

SEQ ID NO: 3306 - DNA, 25 bp, Artificial Sequence
  Description of Artificial Sequence: Synthetic oligonucleotide
tgaaggacaaccacctggccattga

SEQ ID NO: 3307 - DNA, 25 bp, Artificial Sequence
  Description of Artificial Sequence: Synthetic oligonucleotide
gaaggacaaccacctggccattgag

SEQ ID NO: 3308 - DNA, 25 bp, Artificial Sequence
  Description of Artificial Sequence: Synthetic oligonucleotide
aaggacaaccacctggccattgagc

SEQ ID NO: 3309 - DNA, 25 bp, Artificial Sequence
  Description of Artificial Sequence: Synthetic oligonucleotide
aggacaaccacctggccattgagcg

SEQ ID NO: 3310 - DNA, 25 bp, Artificial Sequence
  Description of Artificial Sequence: Synthetic oligonucleotide
ggacaaccacctggccattgagcgc

SEQ ID NO: 3311 - DNA, 25 bp, Artificial Sequence
  Description of Artificial Sequence: Synthetic oligonucleotide
gacaaccacctggccattgagcgca

SEQ ID NO: 3312 - DNA, 25 bp, Artificial Sequence
  Description of Artificial Sequence: Synthetic oligonucleotide
acaaccacctggccattgagcgcaa

SEQ ID NO: 3313 - DNA, 25 bp, Artificial Sequence
  Description of Artificial Sequence: Synthetic oligonucleotide
caaccacctggccattgagcgcaag

SEQ ID NO: 3314 - DNA, 25 bp, Artificial Sequence
  Description of Artificial Sequence: Synthetic oligonucleotide
aaccacctggccattgagcgcaagt

SEQ ID NO: 3315 - DNA, 25 bp, Artificial Sequence
  Description of Artificial Sequence: Synthetic oligonucleotide
accacctggccattgagcgcaagtg

SEQ ID NO: 3316 - DNA, 25 bp, Artificial Sequence
  Description of Artificial Sequence: Synthetic oligonucleotide
ccacctggccattgagcgcaagtgc

SEQ ID NO: 3317 - DNA, 25 bp, Artificial Sequence
  Description of Artificial Sequence: Synthetic oligonucleotide
cacctggccattgagcgcaagtgct

SEQ ID NO: 3318 - DNA, 25 bp, Artificial Sequence
  Description of Artificial Sequence: Synthetic oligonucleotide
acctggccattgagcgcaagtgctc

SEQ ID NO: 3319 - DNA, 25 bp, Artificial Sequence
  Description of Artificial Sequence: Synthetic oligonucleotide
cctggccattgagcgcaagtgctcc

SEQ ID NO: 3320 - DNA, 25 bp, Artificial Sequence
  Description of Artificial Sequence: Synthetic oligonucleotide
ctggccattgagcgcaagtgctcca

SEQ ID NO: 3321 - DNA, 25 bp, Artificial Sequence
  Description of Artificial Sequence: Synthetic oligonucleotide
tggccattgagcgcaagtgctccag

SEQ ID NO: 3322 - DNA, 25 bp, Artificial Sequence
  Description of Artificial Sequence: Synthetic oligonucleotide
ggccattgagcgcaagtgctccagc

SEQ ID NO: 3323 - DNA, 25 bp, Artificial Sequence
  Description of Artificial Sequence: Synthetic oligonucleotide
gccattgagcgcaagtgctccagca

SEQ ID NO: 3324 - DNA, 25 bp, Artificial Sequence
  Description of Artificial Sequence: Synthetic oligonucleotide
ccattgagcgcaagtgctccagcat

SEQ ID NO: 3325 - DNA, 25 bp, Artificial Sequence
  Description of Artificial Sequence: Synthetic oligonucleotide
cattgagcgcaagtgctccagcatc

SEQ ID NO: 3326 - DNA, 25 bp, Artificial Sequence
  Description of Artificial Sequence: Synthetic oligonucleotide
attgagcgcaagtgctccagcatca

SEQ ID NO: 3327 - DNA, 25 bp, Artificial Sequence
  Description of Artificial Sequence: Synthetic oligonucleotide
ttgagcgcaagtgctccagcatcac

SEQ ID NO: 3328 - DNA, 25 bp, Artificial Sequence
  Description of Artificial Sequence: Synthetic oligonucleotide
tgagcgcaagtgctccagcatcacg

SEQ ID NO: 3329 - DNA, 25 bp, Artificial Sequence
  Description of Artificial Sequence: Synthetic oligonucleotide
gagcgcaagtgctccagcatcacgg

SEQ ID NO: 3330 - DNA, 25 bp, Artificial Sequence
  Description of Artificial Sequence: Synthetic oligonucleotide
agcgcaagtgctccagcatcacggt

SEQ ID NO: 3331 - DNA, 25 bp, Artificial Sequence
  Description of Artificial Sequence: Synthetic oligonucleotide
gcgcaagtgctccagcatcacggtc

SEQ ID NO: 3332 - DNA, 25 bp, Artificial Sequence
  Description of Artificial Sequence: Synthetic oligonucleotide
cgcaagtgctccagcatcacggtca

SEQ ID NO: 3333 - DNA, 25 bp, Artificial Sequence
  Description of Artificial Sequence: Synthetic oligonucleotide
gcaagtgctccagcatcacggtcag

SEQ ID NO: 3334 - DNA, 25 bp, Artificial Sequence
  Description of Artificial Sequence: Synthetic oligonucleotide
caagtgctccagcatcacggtcagc

SEQ ID NO: 3335 - DNA, 25 bp, Artificial Sequence
  Description of Artificial Sequence: Synthetic oligonucleotide
aagtgctccagcatcacggtcagct

SEQ ID NO: 3336 - DNA, 25 bp, Artificial Sequence
  Description of Artificial Sequence: Synthetic oligonucleotide
agtgctccagcatcacggtcagctc

SEQ ID NO: 3337 - DNA, 25 bp, Artificial Sequence
  Description of Artificial Sequence: Synthetic oligonucleotide
gtgctccagcatcacggtcagctct

SEQ ID NO: 3338 - DNA, 25 bp, Artificial Sequence
  Description of Artificial Sequence: Synthetic oligonucleotide
tgctccagcatcacggtcagctcta

SEQ ID NO: 3339 - DNA, 25 bp, Artificial Sequence
  Description of Artificial Sequence: Synthetic oligonucleotide
gctccagcatcacggtcagctctac

SEQ ID NO: 3340 - DNA, 25 bp, Artificial Sequence
  Description of Artificial Sequence: Synthetic oligonucleotide
ctccagcatcacggtcagctctacg

SEQ ID NO: 3341 - DNA, 25 bp, Artificial Sequence
  Description of Artificial Sequence: Synthetic oligonucleotide
tccagcatcacggtcagctctacgt

SEQ ID NO: 3342 - DNA, 25 bp, Artificial Sequence
  Description of Artificial Sequence: Synthetic oligonucleotide
ccagcatcacggtcagctctacgtc

SEQ ID NO: 3343 - DNA, 25 bp, Artificial Sequence
  Description of Artificial Sequence: Synthetic oligonucleotide
cagcatcacggtcagctctacgtct

SEQ ID NO: 3344 - DNA, 25 bp, Artificial Sequence
  Description of Artificial Sequence: Synthetic oligonucleotide
agcatcacggtcagctctacgtcta

SEQ ID NO: 3345 - DNA, 25 bp, Artificial Sequence
  Description of Artificial Sequence: Synthetic oligonucleotide
gcatcacggtcagctctacgtctag

SEQ ID NO: 3346 - DNA, 25 bp, Artificial Sequence
  Description of Artificial Sequence: Synthetic oligonucleotide
catcacggtcagctctacgtctagc

SEQ ID NO: 3347 - DNA, 25 bp, Artificial Sequence
  Description of Artificial Sequence: Synthetic oligonucleotide
atcacggtcagctctacgtctagcc

SEQ ID NO: 3348 - DNA, 25 bp, Artificial Sequence
  Description of Artificial Sequence: Synthetic oligonucleotide
tcacggtcagctctacgtctagcct

SEQ ID NO: 3349 - DNA, 25 bp, Artificial Sequence
  Description of Artificial Sequence: Synthetic oligonucleotide
cacggtcagctctacgtctagcctg

SEQ ID NO: 3350 - DNA, 25 bp, Artificial Sequence
  Description of Artificial Sequence: Synthetic oligonucleotide
acggtcagctctacgtctagcctgg

SEQ ID NO: 3351 - DNA, 25 bp, Artificial Sequence
  Description of Artificial Sequence: Synthetic oligonucleotide
cggtcagctctacgtctagcctgga

SEQ ID NO: 3352 - DNA, 25 bp, Artificial Sequence
  Description of Artificial Sequence: Synthetic oligonucleotide
ggtcagctctacgtctagcctggag

SEQ ID NO: 3353 - DNA, 25 bp, Artificial Sequence
  Description of Artificial Sequence: Synthetic oligonucleotide
gtcagctctacgtctagcctggagg

SEQ ID NO: 3354 - DNA, 25 bp, Artificial Sequence
  Description of Artificial Sequence: Synthetic oligonucleotide
tcagctctacgtctagcctggaggc

SEQ ID NO: 3355 - DNA, 25 bp, Artificial Sequence
  Description of Artificial Sequence: Synthetic oligonucleotide
cagctctacgtctagcctggaggct

SEQ ID NO: 3356 - DNA, 25 bp, Artificial Sequence
  Description of Artificial Sequence: Synthetic oligonucleotide
agctctacgtctagcctggaggctg

SEQ ID NO: 3357 - DNA, 25 bp, Artificial Sequence
  Description of Artificial Sequence: Synthetic oligonucleotide
gctctacgtctagcctggaggctga

SEQ ID NO: 3358 - DNA, 25 bp, Artificial Sequence
  Description of Artificial Sequence: Synthetic oligonucleotide
ctctacgtctagcctggaggctgag

SEQ ID NO: 3359 - DNA, 25 bp, Artificial Sequence
  Description of Artificial Sequence: Synthetic oligonucleotide
tctacgtctagcctggaggctgagg

SEQ ID NO: 3360 - DNA, 25 bp, Artificial Sequence
  Description of Artificial Sequence: Synthetic oligonucleotide
ctacgtctagcctggaggctgaggt

SEQ ID NO: 3361 - DNA, 25 bp, Artificial Sequence
  Description of Artificial Sequence: Synthetic oligonucleotide
tacgtctagcctggaggctgaggtg

SEQ ID NO: 3362 - DNA, 25 bp, Artificial Sequence
  Description of Artificial Sequence: Synthetic oligonucleotide
acgtctagcctggaggctgaggtgg

SEQ ID NO: 3363 - DNA, 25 bp, Artificial Sequence
  Description of Artificial Sequence: Synthetic oligonucleotide
cgtctagcctggaggctgaggtgga

SEQ ID NO: 3364 - DNA, 25 bp, Artificial Sequence
  Description of Artificial Sequence: Synthetic oligonucleotide
gtctagcctggaggctgaggtggac

SEQ ID NO: 3365 - DNA, 25 bp, Artificial Sequence
  Description of Artificial Sequence: Synthetic oligonucleotide
tctagcctggaggctgaggtggact

SEQ ID NO: 3366 - DNA, 25 bp, Artificial Sequence
  Description of Artificial Sequence: Synthetic oligonucleotide
ctagcctggaggctgaggtggactt

SEQ ID NO: 3367 - DNA, 25 bp, Artificial Sequence
  Description of Artificial Sequence: Synthetic oligonucleotide
tagcctggaggctgaggtggacttc

SEQ ID NO: 3368 - DNA, 25 bp, Artificial Sequence
  Description of Artificial Sequence: Synthetic oligonucleotide
agcctggaggctgaggtggacttca

SEQ ID NO: 3369 - DNA, 25 bp, Artificial Sequence
  Description of Artificial Sequence: Synthetic oligonucleotide
gcctggaggctgaggtggacttcac

SEQ ID NO: 3370 - DNA, 25 bp, Artificial Sequence
  Description of Artificial Sequence: Synthetic oligonucleotide
cctggaggctgaggtggacttcacg

SEQ ID NO: 3371 - DNA, 25 bp, Artificial Sequence
  Description of Artificial Sequence: Synthetic oligonucleotide
ctggaggctgaggtggacttcacgg

SEQ ID NO: 3372 - DNA, 25 bp, Artificial Sequence
  Description of Artificial Sequence: Synthetic oligonucleotide
tggaggctgaggtggacttcacggt

SEQ ID NO: 3373 - DNA, 25 bp, Artificial Sequence
  Description of Artificial Sequence: Synthetic oligonucleotide
ggaggctgaggtggacttcacggtc

SEQ ID NO: 3374 - DNA, 25 bp, Artificial Sequence
  Description of Artificial Sequence: Synthetic oligonucleotide
gaggctgaggtggacttcacggtca

SEQ ID NO: 3375 - DNA, 25 bp, Artificial Sequence
  Description of Artificial Sequence: Synthetic oligonucleotide
aggctgaggtggacttcacggtcat

SEQ ID NO: 3376 - DNA, 25 bp, Artificial Sequence
  Description of Artificial Sequence: Synthetic oligonucleotide
ggctgaggtggacttcacggtcatt

SEQ ID NO: 3377 - DNA, 25 bp, Artificial Sequence
  Description of Artificial Sequence: Synthetic oligonucleotide
gctgaggtggacttcacggtcattg

SEQ ID NO: 3378 - DNA, 25 bp, Artificial Sequence
  Description of Artificial Sequence: Synthetic oligonucleotide
ctgaggtggacttcacggtcattgg

SEQ ID NO: 3379 - DNA, 25 bp, Artificial Sequence
  Description of Artificial Sequence: Synthetic oligonucleotide
tgaggtggacttcacggtcattggt

SEQ ID NO: 3380 - DNA, 25 bp, Artificial Sequence
  Description of Artificial Sequence: Synthetic oligonucleotide
gaggtggacttcacggtcattggtg

SEQ ID NO: 3381 - DNA, 25 bp, Artificial Sequence
  Description of Artificial Sequence: Synthetic oligonucleotide
aggtggacttcacggtcattggtga

SEQ ID NO: 3382 - DNA, 25 bp, Artificial Sequence
  Description of Artificial Sequence: Synthetic oligonucleotide
ggtggacttcacggtcattggtgac

SEQ ID NO: 3383 - DNA, 25 bp, Artificial Sequence
  Description of Artificial Sequence: Synthetic oligonucleotide
gtggacttcacggtcattggtgact

SEQ ID NO: 3384 - DNA, 25 bp, Artificial Sequence
  Description of Artificial Sequence: Synthetic oligonucleotide
tggacttcacggtcattggtgacta

SEQ ID NO: 3385 - DNA, 25 bp, Artificial Sequence
  Description of Artificial Sequence: Synthetic oligonucleotide
ggacttcacggtcattggtgactac

SEQ ID NO: 3386 - DNA, 25 bp, Artificial Sequence
  Description of Artificial Sequence: Synthetic oligonucleotide
gacttcacggtcattggtgactacc

SEQ ID NO: 3387 - DNA, 25 bp, Artificial Sequence
  Description of Artificial Sequence: Synthetic oligonucleotide
acttcacggtcattggtgactacca

SEQ ID NO: 3388 - DNA, 25 bp, Artificial Sequence
  Description of Artificial Sequence: Synthetic oligonucleotide
cttcacggtcattggtgactaccat

SEQ ID NO: 3389 - DNA, 25 bp, Artificial Sequence
  Description of Artificial Sequence: Synthetic oligonucleotide
ttcacggtcattggtgactaccatg

SEQ ID NO: 3390 - DNA, 25 bp, Artificial Sequence
  Description of Artificial Sequence: Synthetic oligonucleotide
tcacggtcattggtgactaccatgg

SEQ ID NO: 3391 - DNA, 25 bp, Artificial Sequence
  Description of Artificial Sequence: Synthetic oligonucleotide
cacggtcattggtgactaccatggc

SEQ ID NO: 3392 - DNA, 25 bp, Artificial Sequence
  Description of Artificial Sequence: Synthetic oligonucleotide
acggtcattggtgactaccatggca

SEQ ID NO: 3393 - DNA, 25 bp, Artificial Sequence
  Description of Artificial Sequence: Synthetic oligonucleotide
cggtcattggtgactaccatggcag

SEQ ID NO: 3394 - DNA, 25 bp, Artificial Sequence
  Description of Artificial Sequence: Synthetic oligonucleotide
ggtcattggtgactaccatggcagc

SEQ ID NO: 3395 - DNA, 25 bp, Artificial Sequence
  Description of Artificial Sequence: Synthetic oligonucleotide
gtcattggtgactaccatggcagcg

SEQ ID NO: 3396 - DNA, 25 bp, Artificial Sequence
  Description of Artificial Sequence: Synthetic oligonucleotide
tcattggtgactaccatggcagcgc

SEQ ID NO: 3397 - DNA, 25 bp, Artificial Sequence
  Description of Artificial Sequence: Synthetic oligonucleotide
cattggtgactaccatggcagcgcc

SEQ ID NO: 3398 - DNA, 25 bp, Artificial Sequence
  Description of Artificial Sequence: Synthetic oligonucleotide
attggtgactaccatggcagcgcct

SEQ ID NO: 3399 - DNA, 25 bp, Artificial Sequence
  Description of Artificial Sequence: Synthetic oligonucleotide
ttggtgactaccatggcagcgcctt

SEQ ID NO: 3400 - DNA, 25 bp, Artificial Sequence
  Description of Artificial Sequence: Synthetic oligonucleotide
tggtgactaccatggcagcgccttc

SEQ ID NO: 3401 - DNA, 25 bp, Artificial Sequence
  Description of Artificial Sequence: Synthetic oligonucleotide
ggtgactaccatggcagcgccttcg

SEQ ID NO: 3402 - DNA, 25 bp, Artificial Sequence
  Description of Artificial Sequence: Synthetic oligonucleotide
gtgactaccatggcagcgccttcga

SEQ ID NO: 3403 - DNA, 25 bp, Artificial Sequence
  Description of Artificial Sequence: Synthetic oligonucleotide
tgactaccatggcagcgccttcgaa

SEQ ID NO: 3404 - DNA, 25 bp, Artificial Sequence
  Description of Artificial Sequence: Synthetic oligonucleotide
gactaccatggcagcgccttcgaag

SEQ ID NO: 3405 - DNA, 25 bp, Artificial Sequence
  Description of Artificial Sequence: Synthetic oligonucleotide
actaccatggcagcgccttcgaaga

SEQ ID NO: 3406 - DNA, 25 bp, Artificial Sequence
  Description of Artificial Sequence: Synthetic oligonucleotide
ctaccatggcagcgccttcgaagac

SEQ ID NO: 3407 - DNA, 25 bp, Artificial Sequence
  Description of Artificial Sequence: Synthetic oligonucleotide
taccatggcagcgccttcgaagact

SEQ ID NO: 3408 - DNA, 25 bp, Artificial Sequence
  Description of Artificial Sequence: Synthetic oligonucleotide
accatggcagcgccttcgaagactt

SEQ ID NO: 3409 - DNA, 25 bp, Artificial Sequence
  Description of Artificial Sequence: Synthetic oligonucleotide
ccatggcagcgccttcgaagacttc

SEQ ID NO: 3410 - DNA, 25 bp, Artificial Sequence
  Description of Artificial Sequence: Synthetic oligonucleotide
catggcagcgccttcgaagacttct

SEQ ID NO: 3411 - DNA, 25 bp, Artificial Sequence
  Description of Artificial Sequence: Synthetic oligonucleotide
atggcagcgccttcgaagacttctc

SEQ ID NO: 3412 - DNA, 25 bp, Artificial Sequence
  Description of Artificial Sequence: Synthetic oligonucleotide
tggcagcgccttcgaagacttctcc

SEQ ID NO: 3413 - DNA, 25 bp, Artificial Sequence
  Description of Artificial Sequence: Synthetic oligonucleotide
ggcagcgccttcgaagacttctccc

SEQ ID NO: 3414 - DNA, 25 bp, Artificial Sequence
  Description of Artificial Sequence: Synthetic oligonucleotide
gcagcgccttcgaagacttctcccg

SEQ ID NO: 3415 - DNA, 25 bp, Artificial Sequence
  Description of Artificial Sequence: Synthetic oligonucleotide
cagcgccttcgaagacttctcccgc

SEQ ID NO: 3416 - DNA, 25 bp, Artificial Sequence
  Description of Artificial Sequence: Synthetic oligonucleotide
agcgccttcgaagacttctcccgca

SEQ ID NO: 3417 - DNA, 25 bp, Artificial Sequence
  Description of Artificial Sequence: Synthetic oligonucleotide
gcgccttcgaagacttctcccgcag

SEQ ID NO: 3418 - DNA, 25 bp, Artificial Sequence
  Description of Artificial Sequence: Synthetic oligonucleotide
cgccttcgaagacttctcccgcagc

SEQ ID NO: 3419 - DNA, 25 bp, Artificial Sequence
  Description of Artificial Sequence: Synthetic oligonucleotide
gccttcgaagacttctcccgcagcc

SEQ ID NO: 3420 - DNA, 25 bp, Artificial Sequence
  Description of Artificial Sequence: Synthetic oligonucleotide
ccttcgaagacttctcccgcagcct

SEQ ID NO: 3421 - DNA, 25 bp, Artificial Sequence
  Description of Artificial Sequence: Synthetic oligonucleotide
cttcgaagacttctcccgcagcctg

SEQ ID NO: 3422 - DNA, 25 bp, Artificial Sequence
  Description of Artificial Sequence: Synthetic oligonucleotide
ttcgaagacttctcccgcagcctgc

SEQ ID NO: 3423 - DNA, 25 bp, Artificial Sequence
  Description of Artificial Sequence: Synthetic oligonucleotide
tcgaagacttctcccgcagcctgcc

SEQ ID NO: 3424 - DNA, 25 bp, Artificial Sequence
  Description of Artificial Sequence: Synthetic oligonucleotide
cgaagacttctcccgcagcctgcct

SEQ ID NO: 3425 - DNA, 25 bp, Artificial Sequence
  Description of Artificial Sequence: Synthetic oligonucleotide
gaagacttctcccgcagcctgcctg

SEQ ID NO: 3426 - DNA, 25 bp, Artificial Sequence
  Description of Artificial Sequence: Synthetic oligonucleotide
aagacttctcccgcagcctgcctga

SEQ ID NO: 3427 - DNA, 25 bp, Artificial Sequence
  Description of Artificial Sequence: Synthetic oligonucleotide
agacttctcccgcagcctgcctgag

SEQ ID NO: 3428 - DNA, 25 bp, Artificial Sequence
  Description of Artificial Sequence: Synthetic oligonucleotide
gacttctcccgcagcctgcctgagc

SEQ ID NO: 3429 - DNA, 25 bp, Artificial Sequence
  Description of Artificial Sequence: Synthetic oligonucleotide
acttctcccgcagcctgcctgagct

SEQ ID NO: 3430 - DNA, 25 bp, Artificial Sequence
  Description of Artificial Sequence: Synthetic oligonucleotide
cttctcccgcagcctgcctgagctc

SEQ ID NO: 3431 - DNA, 25 bp, Artificial Sequence
  Description of Artificial Sequence: Synthetic oligonucleotide
ttctcccgcagcctgcctgagctcg

SEQ ID NO: 3432 - DNA, 25 bp, Artificial Sequence
  Description of Artificial Sequence: Synthetic oligonucleotide
tctcccgcagcctgcctgagctcga

SEQ ID NO: 3433 - DNA, 25 bp, Artificial Sequence
  Description of Artificial Sequence: Synthetic oligonucleotide
ctcccgcagcctgcctgagctcgac

SEQ ID NO: 3434 - DNA, 25 bp, Artificial Sequence
  Description of Artificial Sequence: Synthetic oligonucleotide
tcccgcagcctgcctgagctcgacc

SEQ ID NO: 3435 - DNA, 25 bp, Artificial Sequence
  Description of Artificial Sequence: Synthetic oligonucleotide
cccgcagcctgcctgagctcgaccg

SEQ ID NO: 3436 - DNA, 25 bp, Artificial Sequence
  Description of Artificial Sequence: Synthetic oligonucleotide
ccgcagcctgcctgagctcgaccgg

SEQ ID NO: 3437 - DNA, 25 bp, Artificial Sequence
  Description of Artificial Sequence: Synthetic oligonucleotide
cgcagcctgcctgagctcgaccggg

SEQ ID NO: 3438 - DNA, 25 bp, Artificial Sequence
  Description of Artificial Sequence: Synthetic oligonucleotide
gcagcctgcctgagctcgaccggga

SEQ ID NO: 3439 - DNA, 25 bp, Artificial Sequence
  Description of Artificial Sequence: Synthetic oligonucleotide
cagcctgcctgagctcgaccgggac

SEQ ID NO: 3440 - DNA, 25 bp, Artificial Sequence
  Description of Artificial Sequence: Synthetic oligonucleotide
agcctgcctgagctcgaccgggaca

SEQ ID NO: 3441 - DNA, 25 bp, Artificial Sequence
  Description of Artificial Sequence: Synthetic oligonucleotide
gcctgcctgagctcgaccgggacaa

SEQ ID NO: 3442 - DNA, 25 bp, Artificial Sequence
  Description of Artificial Sequence: Synthetic oligonucleotide
cctgcctgagctcgaccgggacaaa

SEQ ID NO: 3443 - DNA, 25 bp, Artificial Sequence
  Description of Artificial Sequence: Synthetic oligonucleotide
ctgcctgagctcgaccgggacaaaa

SEQ ID NO: 3444 - DNA, 25 bp, Artificial Sequence
  Description of Artificial Sequence: Synthetic oligonucleotide
tgcctgagctcgaccgggacaaaag

SEQ ID NO: 3445 - DNA, 25 bp, Artificial Sequence
  Description of Artificial Sequence: Synthetic oligonucleotide
gcctgagctcgaccgggacaaaagc

SEQ ID NO: 3446 - DNA, 25 bp, Artificial Sequence
  Description of Artificial Sequence: Synthetic oligonucleotide
cctgagctcgaccgggacaaaagcg

SEQ ID NO: 3447 - DNA, 25 bp, Artificial Sequence
  Description of Artificial Sequence: Synthetic oligonucleotide
ctgagctcgaccgggacaaaagcga

SEQ ID NO: 3448 - DNA, 25 bp, Artificial Sequence
  Description of Artificial Sequence: Synthetic oligonucleotide
tgagctcgaccgggacaaaagcgac

SEQ ID NO: 3449 - DNA, 25 bp, Artificial Sequence
  Description of Artificial Sequence: Synthetic oligonucleotide
gagctcgaccgggacaaaagcgact

SEQ ID NO: 3450 - DNA, 25 bp, Artificial Sequence
  Description of Artificial Sequence: Synthetic oligonucleotide
agctcgaccgggacaaaagcgactc

SEQ ID NO: 3451 - DNA, 25 bp, Artificial Sequence
  Description of Artificial Sequence: Synthetic oligonucleotide
gctcgaccgggacaaaagcgactcg

SEQ ID NO: 3452 - DNA, 25 bp, Artificial Sequence
  Description of Artificial Sequence: Synthetic oligonucleotide
ctcgaccgggacaaaagcgactcgg

SEQ ID NO: 3453 - DNA, 25 bp, Artificial Sequence
  Description of Artificial Sequence: Synthetic oligonucleotide
tcgaccgggacaaaagcgactcgga

SEQ ID NO: 3454 - DNA, 25 bp, Artificial Sequence
  Description of Artificial Sequence: Synthetic oligonucleotide
cgaccgggacaaaagcgactcggac

SEQ ID NO: 3455 - DNA, 25 bp, Artificial Sequence
  Description of Artificial Sequence: Synthetic oligonucleotide
gaccgggacaaaagcgactcggaca

SEQ ID NO: 3456 - DNA, 25 bp, Artificial Sequence
  Description of Artificial Sequence: Synthetic oligonucleotide
accgggacaaaagcgactcggacac

SEQ ID NO: 3457 - DNA, 25 bp, Artificial Sequence
  Description of Artificial Sequence: Synthetic oligonucleotide
ccgggacaaaagcgactcggacact

SEQ ID NO: 3458 - DNA, 25 bp, Artificial Sequence
  Description of Artificial Sequence: Synthetic oligonucleotide
cgggacaaaagcgactcggacactg

SEQ ID NO: 3459 - DNA, 25 bp, Artificial Sequence
  Description of Artificial Sequence: Synthetic oligonucleotide
gggacaaaagcgactcggacactga

SEQ ID NO: 3460 - DNA, 25 bp, Artificial Sequence
  Description of Artificial Sequence: Synthetic oligonucleotide
ggacaaaagcgactcggacactgag

SEQ ID NO: 3461 - DNA, 25 bp, Artificial Sequence
  Description of Artificial Sequence: Synthetic oligonucleotide
gacaaaagcgactcggacactgagg

SEQ ID NO: 3462 - DNA, 25 bp, Artificial Sequence
  Description of Artificial Sequence: Synthetic oligonucleotide
acaaaagcgactcggacactgaggg

SEQ ID NO: 3463 - DNA, 25 bp, Artificial Sequence
  Description of Artificial Sequence: Synthetic oligonucleotide
caaaagcgactcggacactgagggc

SEQ ID NO: 3464 - DNA, 25 bp, Artificial Sequence
  Description of Artificial Sequence: Synthetic oligonucleotide
aaaagcgactcggacactgagggcc

SEQ ID NO: 3465 - DNA, 25 bp, Artificial Sequence
  Description of Artificial Sequence: Synthetic oligonucleotide
aaagcgactcggacactgagggcct

SEQ ID NO: 3466 - DNA, 25 bp, Artificial Sequence
  Description of Artificial Sequence: Synthetic oligonucleotide
aagcgactcggacactgagggcctg

SEQ ID NO: 3467 - DNA, 25 bp, Artificial Sequence
  Description of Artificial Sequence: Synthetic oligonucleotide
agcgactcggacactgagggcctgc

SEQ ID NO: 3468 - DNA, 25 bp, Artificial Sequence
  Description of Artificial Sequence: Synthetic oligonucleotide
gcgactcggacactgagggcctgct

SEQ ID NO: 3469 - DNA, 25 bp, Artificial Sequence
  Description of Artificial Sequence: Synthetic oligonucleotide
cgactcggacactgagggcctgctg

SEQ ID NO: 3470 - DNA, 25 bp, Artificial Sequence
  Description of Artificial Sequence: Synthetic oligonucleotide
gactcggacactgagggcctgctgt

SEQ ID NO: 3471 - DNA, 25 bp, Artificial Sequence
  Description of Artificial Sequence: Synthetic oligonucleotide
actcggacactgagggcctgctgtt

SEQ ID NO: 3472 - DNA, 25 bp, Artificial Sequence
  Description of Artificial Sequence: Synthetic oligonucleotide
ctcggacactgagggcctgctgttc

SEQ ID NO: 3473 - DNA, 25 bp, Artificial Sequence
  Description of Artificial Sequence: Synthetic oligonucleotide
tcggacactgagggcctgctgttct

SEQ ID NO: 3474 - DNA, 25 bp, Artificial Sequence
  Description of Artificial Sequence: Synthetic oligonucleotide
cggacactgagggcctgctgttctc

SEQ ID NO: 3475 - DNA, 25 bp, Artificial Sequence
  Description of Artificial Sequence: Synthetic oligonucleotide
ggacactgagggcctgctgttctcc

SEQ ID NO: 3476 - DNA, 25 bp, Artificial Sequence
  Description of Artificial Sequence: Synthetic oligonucleotide
gacactgagggcctgctgttctccc

SEQ ID NO: 3477 - DNA, 25 bp, Artificial Sequence
  Description of Artificial Sequence: Synthetic oligonucleotide
acactgagggcctgctgttctcccg

SEQ ID NO: 3478 - DNA, 25 bp, Artificial Sequence
  Description of Artificial Sequence: Synthetic oligonucleotide
cactgagggcctgctgttctcccgg

SEQ ID NO: 3479 - DNA, 25 bp, Artificial Sequence
  Description of Artificial Sequence: Synthetic oligonucleotide
actgagggcctgctgttctcccggg

SEQ ID NO: 3480 - DNA, 25 bp, Artificial Sequence
  Description of Artificial Sequence: Synthetic oligonucleotide
ctgagggcctgctgttctcccggga

SEQ ID NO: 3481 - DNA, 25 bp, Artificial Sequence
  Description of Artificial Sequence: Synthetic oligonucleotide
tgagggcctgctgttctcccgggat

SEQ ID NO: 3482 - DNA, 25 bp, Artificial Sequence
  Description of Artificial Sequence: Synthetic oligonucleotide
gagggcctgctgttctcccgggatc

SEQ ID NO: 3483 - DNA, 25 bp, Artificial Sequence
  Description of Artificial Sequence: Synthetic oligonucleotide
agggcctgctgttctcccgggatct

SEQ ID NO: 3484 - DNA, 25 bp, Artificial Sequence
  Description of Artificial Sequence: Synthetic oligonucleotide
gggcctgctgttctcccgggatctc

SEQ ID NO: 3485 - DNA, 25 bp, Artificial Sequence
  Description of Artificial Sequence: Synthetic oligonucleotide
ggcctgctgttctcccgggatctca

SEQ ID NO: 3486 - DNA, 25 bp, Artificial Sequence
  Description of Artificial Sequence: Synthetic oligonucleotide
gcctgctgttctcccgggatctcaa

SEQ ID NO: 3487 - DNA, 25 bp, Artificial Sequence
  Description of Artificial Sequence: Synthetic oligonucleotide
cctgctgttctcccgggatctcaac

SEQ ID NO: 3488 - DNA, 25 bp, Artificial Sequence
  Description of Artificial Sequence: Synthetic oligonucleotide
ctgctgttctcccgggatctcaaca

SEQ ID NO: 3489 - DNA, 25 bp, Artificial Sequence
  Description of Artificial Sequence: Synthetic oligonucleotide
tgctgttctcccgggatctcaacaa

SEQ ID NO: 3490 - DNA, 25 bp, Artificial Sequence
  Description of Artificial Sequence: Synthetic oligonucleotide
gctgttctcccgggatctcaacaag

SEQ ID NO: 3491 - DNA, 25 bp, Artificial Sequence
  Description of Artificial Sequence: Synthetic oligonucleotide
ctgttctcccgggatctcaacaagg

SEQ ID NO: 3492 - DNA, 25 bp, Artificial Sequence
  Description of Artificial Sequence: Synthetic oligonucleotide
tgttctcccgggatctcaacaaggg

SEQ ID NO: 3493 - DNA, 25 bp, Artificial Sequence
  Description of Artificial Sequence: Synthetic oligonucleotide
gttctcccgggatctcaacaagggg

SEQ ID NO: 3494 - DNA, 25 bp, Artificial Sequence
  Description of Artificial Sequence: Synthetic oligonucleotide
ttctcccgggatctcaacaaggggg

SEQ ID NO: 3495 - DNA, 25 bp, Artificial Sequence
  Description of Artificial Sequence: Synthetic oligonucleotide
tctcccgggatctcaacaagggggc

SEQ ID NO: 3496 - DNA, 25 bp, Artificial Sequence
  Description of Artificial Sequence: Synthetic oligonucleotide
ctcccgggatctcaacaagggggcc

SEQ ID NO: 3497 - DNA, 25 bp, Artificial Sequence
  Description of Artificial Sequence: Synthetic oligonucleotide
tcccgggatctcaacaagggggccc

SEQ ID NO: 3498 - DNA, 25 bp, Artificial Sequence
  Description of Artificial Sequence: Synthetic oligonucleotide
cccgggatctcaacaagggggcccc

SEQ ID NO: 3499 - DNA, 25 bp, Artificial Sequence
  Description of Artificial Sequence: Synthetic oligonucleotide
ccgggatctcaacaagggggccccc

SEQ ID NO: 3500 - DNA, 25 bp, Artificial Sequence
  Description of Artificial Sequence: Synthetic oligonucleotide
cgggatctcaacaagggggccccca

SEQ ID NO: 3501 - DNA, 25 bp, Artificial Sequence
  Description of Artificial Sequence: Synthetic oligonucleotide
gggatctcaacaagggggcccccag

SEQ ID NO: 3502 - DNA, 25 bp, Artificial Sequence
  Description of Artificial Sequence: Synthetic oligonucleotide
ggatctcaacaagggggcccccagc

SEQ ID NO: 3503 - DNA, 25 bp, Artificial Sequence
  Description of Artificial Sequence: Synthetic oligonucleotide
gatctcaacaagggggcccccagcc

SEQ ID NO: 3504 - DNA, 25 bp, Artificial Sequence
  Description of Artificial Sequence: Synthetic oligonucleotide
atctcaacaagggggcccccagcca

SEQ ID NO: 3505 - DNA, 25 bp, Artificial Sequence
  Description of Artificial Sequence: Synthetic oligonucleotide
tctcaacaagggggcccccagccag

SEQ ID NO: 3506 - DNA, 25 bp, Artificial Sequence
  Description of Artificial Sequence: Synthetic oligonucleotide
ctcaacaagggggcccccagccagg

SEQ ID NO: 3507 - DNA, 25 bp, Artificial Sequence
  Description of Artificial Sequence: Synthetic oligonucleotide
tcaacaagggggcccccagccagga

SEQ ID NO: 3508 - DNA, 25 bp, Artificial Sequence
  Description of Artificial Sequence: Synthetic oligonucleotide
caacaagggggcccccagccaggat

SEQ ID NO: 3509 - DNA, 25 bp, Artificial Sequence
  Description of Artificial Sequence: Synthetic oligonucleotide
aacaagggggcccccagccaggatg

SEQ ID NO: 3510 - DNA, 25 bp, Artificial Sequence
  Description of Artificial Sequence: Synthetic oligonucleotide
acaagggggcccccagccaggatga

SEQ ID NO: 3511 - DNA, 25 bp, Artificial Sequence
  Description of Artificial Sequence: Synthetic oligonucleotide
caagggggcccccagccaggatgat

SEQ ID NO: 3512 - DNA, 25 bp, Artificial Sequence
  Description of Artificial Sequence: Synthetic oligonucleotide
aagggggcccccagccaggatgatg

SEQ ID NO: 3513 - DNA, 25 bp, Artificial Sequence
  Description of Artificial Sequence: Synthetic oligonucleotide
agggggcccccagccaggatgatga

SEQ ID NO: 3514 - DNA, 25 bp, Artificial Sequence
  Description of Artificial Sequence: Synthetic oligonucleotide
gggggcccccagccaggatgatgag

SEQ ID NO: 3515 - DNA, 25 bp, Artificial Sequence
  Description of Artificial Sequence: Synthetic oligonucleotide
ggggcccccagccaggatgatgagt

SEQ ID NO: 3516 - DNA, 25 bp, Artificial Sequence
  Description of Artificial Sequence: Synthetic oligonucleotide
gggcccccagccaggatgatgagtc

SEQ ID NO: 3517 - DNA, 25 bp, Artificial Sequence
  Description of Artificial Sequence: Synthetic oligonucleotide
ggcccccagccaggatgatgagtct

SEQ ID NO: 3518 - DNA, 25 bp, Artificial Sequence
  Description of Artificial Sequence: Synthetic oligonucleotide
gcccccagccaggatgatgagtctg

SEQ ID NO: 3519 - DNA, 25 bp, Artificial Sequence
  Description of Artificial Sequence: Synthetic oligonucleotide
cccccagccaggatgatgagtctgg

SEQ ID NO: 3520 - DNA, 25 bp, Artificial Sequence
  Description of Artificial Sequence: Synthetic oligonucleotide
ccccagccaggatgatgagtctggg

SEQ ID NO: 3521 - DNA, 25 bp, Artificial Sequence
  Description of Artificial Sequence: Synthetic oligonucleotide
cccagccaggatgatgagtctgggg

SEQ ID NO: 3522 - DNA, 25 bp, Artificial Sequence
  Description of Artificial Sequence: Synthetic oligonucleotide
ccagccaggatgatgagtctggggg

SEQ ID NO: 3523 - DNA, 25 bp, Artificial Sequence
  Description of Artificial Sequence: Synthetic oligonucleotide
cagccaggatgatgagtctgggggc

SEQ ID NO: 3524 - DNA, 25 bp, Artificial Sequence
  Description of Artificial Sequence: Synthetic oligonucleotide
agccaggatgatgagtctgggggca

SEQ ID NO: 3525 - DNA, 25 bp, Artificial Sequence
  Description of Artificial Sequence: Synthetic oligonucleotide
gccaggatgatgagtctgggggcat

SEQ ID NO: 3526 - DNA, 25 bp, Artificial Sequence
  Description of Artificial Sequence: Synthetic oligonucleotide
ccaggatgatgagtctgggggcatt

SEQ ID NO: 3527 - DNA, 25 bp, Artificial Sequence
  Description of Artificial Sequence: Synthetic oligonucleotide
caggatgatgagtctgggggcattg

SEQ ID NO: 3528 - DNA, 25 bp, Artificial Sequence
  Description of Artificial Sequence: Synthetic oligonucleotide
aggatgatgagtctgggggcattga

SEQ ID NO: 3529 - DNA, 25 bp, Artificial Sequence
  Description of Artificial Sequence: Synthetic oligonucleotide
ggatgatgagtctgggggcattgag

SEQ ID NO: 3530 - DNA, 25 bp, Artificial Sequence
  Description of Artificial Sequence: Synthetic oligonucleotide
gatgatgagtctgggggcattgagg

SEQ ID NO: 3531 - DNA, 25 bp, Artificial Sequence
  Description of Artificial Sequence: Synthetic oligonucleotide
atgatgagtctgggggcattgagga

SEQ ID NO: 3532 - DNA, 25 bp, Artificial Sequence
  Description of Artificial Sequence: Synthetic oligonucleotide
tgatgagtctgggggcattgaggac

SEQ ID NO: 3533 - DNA, 25 bp, Artificial Sequence
  Description of Artificial Sequence: Synthetic oligonucleotide
gatgagtctgggggcattgaggaca

SEQ ID NO: 3534 - DNA, 25 bp, Artificial Sequence
  Description of Artificial Sequence: Synthetic oligonucleotide
atgagtctgggggcattgaggacag

SEQ ID NO: 3535 - DNA, 25 bp, Artificial Sequence
  Description of Artificial Sequence: Synthetic oligonucleotide
tgagtctgggggcattgaggacagc

SEQ ID NO: 3536 - DNA, 25 bp, Artificial Sequence
  Description of Artificial Sequence: Synthetic oligonucleotide
gagtctgggggcattgaggacagcc

SEQ ID NO: 3537 - DNA, 25 bp, Artificial Sequence
  Description of Artificial Sequence: Synthetic oligonucleotide
agtctgggggcattgaggacagccc

SEQ ID NO: 3538 - DNA, 25 bp, Artificial Sequence
  Description of Artificial Sequence: Synthetic oligonucleotide
gtctgggggcattgaggacagcccg

SEQ ID NO: 3539 - DNA, 25 bp, Artificial Sequence
  Description of Artificial Sequence: Synthetic oligonucleotide
tctgggggcattgaggacagcccgg

SEQ ID NO: 3540 - DNA, 25 bp, Artificial Sequence
  Description of Artificial Sequence: Synthetic oligonucleotide
ctgggggcattgaggacagcccgga

SEQ ID NO: 3541 - DNA, 25 bp, Artificial Sequence
  Description of Artificial Sequence: Synthetic oligonucleotide
tgggggcattgaggacagcccggat

SEQ ID NO: 3542 - DNA, 25 bp, Artificial Sequence
  Description of Artificial Sequence: Synthetic oligonucleotide
gggggcattgaggacagcccggatc

SEQ ID NO: 3543 - DNA, 25 bp, Artificial Sequence
  Description of Artificial Sequence: Synthetic oligonucleotide
ggggcattgaggacagcccggatcg

SEQ ID NO: 3544 - DNA, 25 bp, Artificial Sequence
  Description of Artificial Sequence: Synthetic oligonucleotide
gggcattgaggacagcccggatcga

SEQ ID NO: 3545 - DNA, 25 bp, Artificial Sequence
  Description of Artificial Sequence: Synthetic oligonucleotide
ggcattgaggacagcccggatcgag

SEQ ID NO: 3546 - DNA, 25 bp, Artificial Sequence
  Description of Artificial Sequence: Synthetic oligonucleotide
gcattgaggacagcccggatcgagg

SEQ ID NO: 3547 - DNA, 25 bp, Artificial Sequence
  Description of Artificial Sequence: Synthetic oligonucleotide
cattgaggacagcccggatcgaggg

SEQ ID NO: 3548 - DNA, 25 bp, Artificial Sequence
  Description of Artificial Sequence: Synthetic oligonucleotide
attgaggacagcccggatcgagggg

SEQ ID NO: 3549 - DNA, 25 bp, Artificial Sequence
  Description of Artificial Sequence: Synthetic oligonucleotide
ttgaggacagcccggatcgaggggc

SEQ ID NO: 3550 - DNA, 25 bp, Artificial Sequence
  Description of Artificial Sequence: Synthetic oligonucleotide
tgaggacagcccggatcgaggggcc

SEQ ID NO: 3551 - DNA, 25 bp, Artificial Sequence
  Description of Artificial Sequence: Synthetic oligonucleotide
gaggacagcccggatcgaggggcct

SEQ ID NO: 3552 - DNA, 25 bp, Artificial Sequence
  Description of Artificial Sequence: Synthetic oligonucleotide
aggacagcccggatcgaggggcctg

SEQ ID NO: 3553 - DNA, 25 bp, Artificial Sequence
  Description of Artificial Sequence: Synthetic oligonucleotide
ggacagcccggatcgaggggcctgc

SEQ ID NO: 3554 - DNA, 25 bp, Artificial Sequence
  Description of Artificial Sequence: Synthetic oligonucleotide
gacagcccggatcgaggggcctgct

SEQ ID NO: 3555 - DNA, 25 bp, Artificial Sequence
  Description of Artificial Sequence: Synthetic oligonucleotide
acagcccggatcgaggggcctgctc

SEQ ID NO: 3556 - DNA, 25 bp, Artificial Sequence
  Description of Artificial Sequence: Synthetic oligonucleotide
cagcccggatcgaggggcctgctcc

SEQ ID NO: 3557 - DNA, 25 bp, Artificial Sequence
  Description of Artificial Sequence: Synthetic oligonucleotide
agcccggatcgaggggcctgctcca

SEQ ID NO: 3558 - DNA, 25 bp, Artificial Sequence
  Description of Artificial Sequence: Synthetic oligonucleotide
gcccggatcgaggggcctgctccac

SEQ ID NO: 3559 - DNA, 25 bp, Artificial Sequence
  Description of Artificial Sequence: Synthetic oligonucleotide
cccggatcgaggggcctgctccacc

SEQ ID NO: 3560 - DNA, 25 bp, Artificial Sequence
  Description of Artificial Sequence: Synthetic oligonucleotide
ccggatcgaggggcctgctccaccc

SEQ ID NO: 3561 - DNA, 25 bp, Artificial Sequence
  Description of Artificial Sequence: Synthetic oligonucleotide
cggatcgaggggcctgctccacccc

SEQ ID NO: 3562 - DNA, 25 bp, Artificial Sequence
  Description of Artificial Sequence: Synthetic oligonucleotide
ggatcgaggggcctgctccaccccg

SEQ ID NO: 3563 - DNA, 25 bp, Artificial Sequence
  Description of Artificial Sequence: Synthetic oligonucleotide
gatcgaggggcctgctccaccccgg

SEQ ID NO: 3564 - DNA, 25 bp, Artificial Sequence
  Description of Artificial Sequence: Synthetic oligonucleotide
atcgaggggcctgctccaccccgga

SEQ ID NO: 3565 - DNA, 25 bp, Artificial Sequence
  Description of Artificial Sequence: Synthetic oligonucleotide
tcgaggggcctgctccaccccggat

SEQ ID NO: 3566 - DNA, 25 bp, Artificial Sequence
  Description of Artificial Sequence: Synthetic oligonucleotide
cgaggggcctgctccaccccggata

SEQ ID NO: 3567 - DNA, 25 bp, Artificial Sequence
  Description of Artificial Sequence: Synthetic oligonucleotide
gaggggcctgctccaccccggatat

SEQ ID NO: 3568 - DNA, 25 bp, Artificial Sequence
  Description of Artificial Sequence: Synthetic oligonucleotide
aggggcctgctccaccccggatatg

SEQ ID NO: 3569 - DNA, 25 bp, Artificial Sequence
  Description of Artificial Sequence: Synthetic oligonucleotide
ggggcctgctccaccccggatatgc

SEQ ID NO: 3570 - DNA, 25 bp, Artificial Sequence
  Description of Artificial Sequence: Synthetic oligonucleotide
gggcctgctccaccccggatatgcc

SEQ ID NO: 3571 - DNA, 25 bp, Artificial Sequence
  Description of Artificial Sequence: Synthetic oligonucleotide
ggcctgctccaccccggatatgccc

SEQ ID NO: 3572 - DNA, 25 bp, Artificial Sequence
  Description of Artificial Sequence: Synthetic oligonucleotide
gcctgctccaccccggatatgcccc

SEQ ID NO: 3573 - DNA, 25 bp, Artificial Sequence
  Description of Artificial Sequence: Synthetic oligonucleotide
cctgctccaccccggatatgcccca

SEQ ID NO: 3574 - DNA, 25 bp, Artificial Sequence
  Description of Artificial Sequence: Synthetic oligonucleotide
ctgctccaccccggatatgccccag

SEQ ID NO: 3575 - DNA, 25 bp, Artificial Sequence
  Description of Artificial Sequence: Synthetic oligonucleotide
tgctccaccccggatatgccccagt

SEQ ID NO: 3576 - DNA, 25 bp, Artificial Sequence
  Description of Artificial Sequence: Synthetic oligonucleotide
gctccaccccggatatgccccagtt

SEQ ID NO: 3577 - DNA, 25 bp, Artificial Sequence
  Description of Artificial Sequence: Synthetic oligonucleotide
ctccaccccggatatgccccagttt

SEQ ID NO: 3578 - DNA, 25 bp, Artificial Sequence
  Description of Artificial Sequence: Synthetic oligonucleotide
tccaccccggatatgccccagtttg

SEQ ID NO: 3579 - DNA, 25 bp, Artificial Sequence
  Description of Artificial Sequence: Synthetic oligonucleotide
ccaccccggatatgccccagtttga

SEQ ID NO: 3580 - DNA, 25 bp, Artificial Sequence
  Description of Artificial Sequence: Synthetic oligonucleotide
caccccggatatgccccagtttgag

SEQ ID NO: 3581 - DNA, 25 bp, Artificial Sequence
  Description of Artificial Sequence: Synthetic oligonucleotide
accccggatatgccccagtttgagg

SEQ ID NO: 3582 - DNA, 25 bp, Artificial Sequence
  Description of Artificial Sequence: Synthetic oligonucleotide
ccccggatatgccccagtttgaggt

SEQ ID NO: 3583 - DNA, 25 bp, Artificial Sequence
  Description of Artificial Sequence: Synthetic oligonucleotide
cccggatatgccccagtttgaggta

SEQ ID NO: 3584 - DNA, 25 bp, Artificial Sequence
  Description of Artificial Sequence: Synthetic oligonucleotide
ccggatatgccccagtttgaggtac

SEQ ID NO: 3585 - DNA, 25 bp, Artificial Sequence
  Description of Artificial Sequence: Synthetic oligonucleotide
cggatatgccccagtttgaggtaca

SEQ ID NO: 3586 - DNA, 25 bp, Artificial Sequence
  Description of Artificial Sequence: Synthetic oligonucleotide
ggatatgccccagtttgaggtacag

SEQ ID NO: 3587 - DNA, 25 bp, Artificial Sequence
  Description of Artificial Sequence: Synthetic oligonucleotide
gatatgccccagtttgaggtacagt

SEQ ID NO: 3588 - DNA, 25 bp, Artificial Sequence
  Description of Artificial Sequence: Synthetic oligonucleotide
atatgccccagtttgaggtacagtg

SEQ ID NO: 3589 - DNA, 25 bp, Artificial Sequence
  Description of Artificial Sequence: Synthetic oligonucleotide
tatgccccagtttgaggtacagtgg

SEQ ID NO: 3590 - DNA, 25 bp, Artificial Sequence
  Description of Artificial Sequence: Synthetic oligonucleotide
atgccccagtttgaggtacagtgga

SEQ ID NO: 3591 - DNA, 25 bp, Artificial Sequence
  Description of Artificial Sequence: Synthetic oligonucleotide
tgccccagtttgaggtacagtggag

SEQ ID NO: 3592 - DNA, 25 bp, Artificial Sequence
  Description of Artificial Sequence: Synthetic oligonucleotide
gccccagtttgaggtacagtggagc

SEQ ID NO: 3593 - DNA, 25 bp, Artificial Sequence
  Description of Artificial Sequence: Synthetic oligonucleotide
ccccagtttgaggtacagtggagct

SEQ ID NO: 3594 - DNA, 25 bp, Artificial Sequence
  Description of Artificial Sequence: Synthetic oligonucleotide
cccagtttgaggtacagtggagctt

SEQ ID NO: 3595 - DNA, 25 bp, Artificial Sequence
  Description of Artificial Sequence: Synthetic oligonucleotide
ccagtttgaggtacagtggagcttc

SEQ ID NO: 3596 - DNA, 25 bp, Artificial Sequence
  Description of Artificial Sequence: Synthetic oligonucleotide
cagtttgaggtacagtggagcttcc

SEQ ID NO: 3597 - DNA, 25 bp, Artificial Sequence
  Description of Artificial Sequence: Synthetic oligonucleotide
agtttgaggtacagtggagcttcct

SEQ ID NO: 3598 - DNA, 25 bp, Artificial Sequence
  Description of Artificial Sequence: Synthetic oligonucleotide
gtttgaggtacagtggagcttcctc

SEQ ID NO: 3599 - DNA, 25 bp, Artificial Sequence
  Description of Artificial Sequence: Synthetic oligonucleotide
tttgaggtacagtggagcttcctca

SEQ ID NO: 3600 - DNA, 25 bp, Artificial Sequence
  Description of Artificial Sequence: Synthetic oligonucleotide
ttgaggtacagtggagcttcctcaa

SEQ ID NO: 3601 - DNA, 25 bp, Artificial Sequence
  Description of Artificial Sequence: Synthetic oligonucleotide
tgaggtacagtggagcttcctcaag

SEQ ID NO: 3602 - DNA, 25 bp, Artificial Sequence
  Description of Artificial Sequence: Synthetic oligonucleotide
gaggtacagtggagcttcctcaaga

SEQ ID NO: 3603 - DNA, 25 bp, Artificial Sequence
  Description of Artificial Sequence: Synthetic oligonucleotide
aggtacagtggagcttcctcaagag

SEQ ID NO: 3604 - DNA, 25 bp, Artificial Sequence
  Description of Artificial Sequence: Synthetic oligonucleotide
ggtacagtggagcttcctcaagagc

SEQ ID NO: 3605 - DNA, 25 bp, Artificial Sequence
  Description of Artificial Sequence: Synthetic oligonucleotide
gtacagtggagcttcctcaagagcc

SEQ ID NO: 3606 - DNA, 25 bp, Artificial Sequence
  Description of Artificial Sequence: Synthetic oligonucleotide
tacagtggagcttcctcaagagcca

SEQ ID NO: 3607 - DNA, 25 bp, Artificial Sequence
  Description of Artificial Sequence: Synthetic oligonucleotide
acagtggagcttcctcaagagccag

SEQ ID NO: 3608 - DNA, 25 bp, Artificial Sequence
  Description of Artificial Sequence: Synthetic oligonucleotide
cagtggagcttcctcaagagccagg

SEQ ID NO: 3609 - DNA, 25 bp, Artificial Sequence
  Description of Artificial Sequence: Synthetic oligonucleotide
agtggagcttcctcaagagccaggc

SEQ ID NO: 3610 - DNA, 25 bp, Artificial Sequence
  Description of Artificial Sequence: Synthetic oligonucleotide
gtggagcttcctcaagagccaggcc

SEQ ID NO: 3611 - DNA, 25 bp, Artificial Sequence
  Description of Artificial Sequence: Synthetic oligonucleotide
tggagcttcctcaagagccaggccc

SEQ ID NO: 3612 - DNA, 25 bp, Artificial Sequence
  Description of Artificial Sequence: Synthetic oligonucleotide
ggagcttcctcaagagccaggcccg

SEQ ID NO: 3613 - DNA, 25 bp, Artificial Sequence
  Description of Artificial Sequence: Synthetic oligonucleotide
gagcttcctcaagagccaggcccgc

SEQ ID NO: 3614 - DNA, 25 bp, Artificial Sequence
  Description of Artificial Sequence: Synthetic oligonucleotide
agcttcctcaagagccaggcccgct

SEQ ID NO: 3615 - DNA, 25 bp, Artificial Sequence
  Description of Artificial Sequence: Synthetic oligonucleotide
gcttcctcaagagccaggcccgctg

SEQ ID NO: 3616 - DNA, 25 bp, Artificial Sequence
  Description of Artificial Sequence: Synthetic oligonucleotide
cttcctcaagagccaggcccgctgg

SEQ ID NO: 3617 - DNA, 25 bp, Artificial Sequence
  Description of Artificial Sequence: Synthetic oligonucleotide
ttcctcaagagccaggcccgctggg

SEQ ID NO: 3618 - DNA, 25 bp, Artificial Sequence
  Description of Artificial Sequence: Synthetic oligonucleotide
tcctcaagagccaggcccgctgggc

SEQ ID NO: 3619 - DNA, 25 bp, Artificial Sequence
  Description of Artificial Sequence: Synthetic oligonucleotide
cctcaagagccaggcccgctgggca

SEQ ID NO: 3620 - DNA, 25 bp, Artificial Sequence
  Description of Artificial Sequence: Synthetic oligonucleotide
ctcaagagccaggcccgctgggcac

SEQ ID NO: 3621 - DNA, 25 bp, Artificial Sequence
  Description of Artificial Sequence: Synthetic oligonucleotide
tcaagagccaggcccgctgggcacc

SEQ ID NO: 3622 - DNA, 25 bp, Artificial Sequence
  Description of Artificial Sequence: Synthetic oligonucleotide
caagagccaggcccgctgggcaccg

SEQ ID NO: 3623 - DNA, 25 bp, Artificial Sequence
  Description of Artificial Sequence: Synthetic oligonucleotide
aagagccaggcccgctgggcaccgc

SEQ ID NO: 3624 - DNA, 25 bp, Artificial Sequence
  Description of Artificial Sequence: Synthetic oligonucleotide
agagccaggcccgctgggcaccgca

SEQ ID NO: 3625 - DNA, 25 bp, Artificial Sequence
  Description of Artificial Sequence: Synthetic oligonucleotide
gagccaggcccgctgggcaccgcat

SEQ ID NO: 3626 - DNA, 25 bp, Artificial Sequence
  Description of Artificial Sequence: Synthetic oligonucleotide
agccaggcccgctgggcaccgcatg

SEQ ID NO: 3627 - DNA, 25 bp, Artificial Sequence
  Description of Artificial Sequence: Synthetic oligonucleotide
gccaggcccgctgggcaccgcatgc

SEQ ID NO: 3628 - DNA, 25 bp, Artificial Sequence
  Description of Artificial Sequence: Synthetic oligonucleotide
ccaggcccgctgggcaccgcatgct

SEQ ID NO: 3629 - DNA, 25 bp, Artificial Sequence
  Description of Artificial Sequence: Synthetic oligonucleotide
caggcccgctgggcaccgcatgctc

SEQ ID NO: 3630 - DNA, 25 bp, Artificial Sequence
  Description of Artificial Sequence: Synthetic oligonucleotide
aggcccgctgggcaccgcatgctca

SEQ ID NO: 3631 - DNA, 25 bp, Artificial Sequence
  Description of Artificial Sequence: Synthetic oligonucleotide
tgaaatatagcacagaaagactcaa

SEQ ID NO: 3632 - DNA, 25 bp, Artificial Sequence
  Description of Artificial Sequence: Synthetic oligonucleotide
gaaatatagcacagaaagactcaag

SEQ ID NO: 3633 - DNA, 25 bp, Artificial Sequence
  Description of Artificial Sequence: Synthetic oligonucleotide
aaatatagcacagaaagactcaagt

SEQ ID NO: 3634 - DNA, 25 bp, Artificial Sequence
  Description of Artificial Sequence: Synthetic oligonucleotide
aatatagcacagaaagactcaagtc

SEQ ID NO: 3635 - DNA, 25 bp, Artificial Sequence
  Description of Artificial Sequence: Synthetic oligonucleotide
atatagcacagaaagactcaagtcc

SEQ ID NO: 3636 - DNA, 25 bp, Artificial Sequence
  Description of Artificial Sequence: Synthetic oligonucleotide
tatagcacagaaagactcaagtcca

SEQ ID NO: 3637 - DNA, 25 bp, Artificial Sequence
  Description of Artificial Sequence: Synthetic oligonucleotide
atagcacagaaagactcaagtccac

SEQ ID NO: 3638 - DNA, 25 bp, Artificial Sequence
  Description of Artificial Sequence: Synthetic oligonucleotide
tagcacagaaagactcaagtccact

SEQ ID NO: 3639 - DNA, 25 bp, Artificial Sequence
  Description of Artificial Sequence: Synthetic oligonucleotide
agcacagaaagactcaagtccactc

SEQ ID NO: 3640 - DNA, 25 bp, Artificial Sequence
  Description of Artificial Sequence: Synthetic oligonucleotide
gcacagaaagactcaagtccactct

SEQ ID NO: 3641 - DNA, 25 bp, Artificial Sequence
  Description of Artificial Sequence: Synthetic oligonucleotide
cacagaaagactcaagtccactcta

SEQ ID NO: 3642 - DNA, 25 bp, Artificial Sequence
  Description of Artificial Sequence: Synthetic oligonucleotide
acagaaagactcaagtccactctat

SEQ ID NO: 3643 - DNA, 25 bp, Artificial Sequence
  Description of Artificial Sequence: Synthetic oligonucleotide
cagaaagactcaagtccactctata

SEQ ID NO: 3644 - DNA, 25 bp, Artificial Sequence
  Description of Artificial Sequence: Synthetic oligonucleotide
agaaagactcaagtccactctatac

SEQ ID NO: 3645 - DNA, 25 bp, Artificial Sequence
  Description of Artificial Sequence: Synthetic oligonucleotide
gaaagactcaagtccactctataca

SEQ ID NO: 3646 - DNA, 25 bp, Artificial Sequence
  Description of Artificial Sequence: Synthetic oligonucleotide
aaagactcaagtccactctatacat

SEQ ID NO: 3647 - DNA, 25 bp, Artificial Sequence
  Description of Artificial Sequence: Synthetic oligonucleotide
aagactcaagtccactctatacatt

SEQ ID NO: 3648 - DNA, 25 bp, Artificial Sequence
  Description of Artificial Sequence: Synthetic oligonucleotide
agactcaagtccactctatacattc

SEQ ID NO: 3649 - DNA, 25 bp, Artificial Sequence
  Description of Artificial Sequence: Synthetic oligonucleotide
gactcaagtccactctatacattca

SEQ ID NO: 3650 - DNA, 25 bp, Artificial Sequence
  Description of Artificial Sequence: Synthetic oligonucleotide
actcaagtccactctatacattcat

SEQ ID NO: 3651 - DNA, 25 bp, Artificial Sequence
  Description of Artificial Sequence: Synthetic oligonucleotide
ctcaagtccactctatacattcata

SEQ ID NO: 3652 - DNA, 25 bp, Artificial Sequence
  Description of Artificial Sequence: Synthetic oligonucleotide
tcaagtccactctatacattcatac

SEQ ID NO: 3653 - DNA, 25 bp, Artificial Sequence
  Description of Artificial Sequence: Synthetic oligonucleotide
caagtccactctatacattcataca

SEQ ID NO: 3654 - DNA, 25 bp, Artificial Sequence
  Description of Artificial Sequence: Synthetic oligonucleotide
aagtccactctatacattcatacag

SEQ ID NO: 3655 - DNA, 25 bp, Artificial Sequence
  Description of Artificial Sequence: Synthetic oligonucleotide
agtccactctatacattcatacagt

SEQ ID NO: 3656 - DNA, 25 bp, Artificial Sequence
  Description of Artificial Sequence: Synthetic oligonucleotide
gtccactctatacattcatacagta

SEQ ID NO: 3657 - DNA, 25 bp, Artificial Sequence
  Description of Artificial Sequence: Synthetic oligonucleotide
tccactctatacattcatacagtac

SEQ ID NO: 3658 - DNA, 25 bp, Artificial Sequence
  Description of Artificial Sequence: Synthetic oligonucleotide
ccactctatacattcatacagtacc

SEQ ID NO: 3659 - DNA, 25 bp, Artificial Sequence
  Description of Artificial Sequence: Synthetic oligonucleotide
cactctatacattcatacagtacct

SEQ ID NO: 3660 - DNA, 25 bp, Artificial Sequence
  Description of Artificial Sequence: Synthetic oligonucleotide
actctatacattcatacagtacctg

SEQ ID NO: 3661 - DNA, 25 bp, Artificial Sequence
  Description of Artificial Sequence: Synthetic oligonucleotide
ctctatacattcatacagtacctgg

SEQ ID NO: 3662 - DNA, 25 bp, Artificial Sequence
  Description of Artificial Sequence: Synthetic oligonucleotide
tctatacattcatacagtacctggg

SEQ ID NO: 3663 - DNA, 25 bp, Artificial Sequence
  Description of Artificial Sequence: Synthetic oligonucleotide
ctatacattcatacagtacctggga

SEQ ID NO: 3664 - DNA, 25 bp, Artificial Sequence
  Description of Artificial Sequence: Synthetic oligonucleotide
tatacattcatacagtacctgggag

SEQ ID NO: 3665 - DNA, 25 bp, Artificial Sequence
  Description of Artificial Sequence: Synthetic oligonucleotide
atacattcatacagtacctgggagc

SEQ ID NO: 3666 - DNA, 25 bp, Artificial Sequence
  Description of Artificial Sequence: Synthetic oligonucleotide
tacattcatacagtacctgggagct

SEQ ID NO: 3667 - DNA, 25 bp, Artificial Sequence
  Description of Artificial Sequence: Synthetic oligonucleotide
acattcatacagtacctgggagctg

SEQ ID NO: 3668 - DNA, 25 bp, Artificial Sequence
  Description of Artificial Sequence: Synthetic oligonucleotide
cattcatacagtacctgggagctga

SEQ ID NO: 3669 - DNA, 25 bp, Artificial Sequence
  Description of Artificial Sequence: Synthetic oligonucleotide
attcatacagtacctgggagctgaa

SEQ ID NO: 3670 - DNA, 25 bp, Artificial Sequence
  Description of Artificial Sequence: Synthetic oligonucleotide
ttcatacagtacctgggagctgaat

SEQ ID NO: 3671 - DNA, 25 bp, Artificial Sequence
  Description of Artificial Sequence: Synthetic oligonucleotide
tcatacagtacctgggagctgaatc

SEQ ID NO: 3672 - DNA, 25 bp, Artificial Sequence
  Description of Artificial Sequence: Synthetic oligonucleotide
catacagtacctgggagctgaatct

SEQ ID NO: 3673 - DNA, 25 bp, Artificial Sequence
  Description of Artificial Sequence: Synthetic oligonucleotide
atacagtacctgggagctgaatctg

SEQ ID NO: 3674 - DNA, 25 bp, Artificial Sequence
  Description of Artificial Sequence: Synthetic oligonucleotide
tacagtacctgggagctgaatctgt

SEQ ID NO: 3675 - DNA, 25 bp, Artificial Sequence
  Description of Artificial Sequence: Synthetic oligonucleotide
acagtacctgggagctgaatctgtg

SEQ ID NO: 3676 - DNA, 25 bp, Artificial Sequence
  Description of Artificial Sequence: Synthetic oligonucleotide
cagtacctgggagctgaatctgtga

SEQ ID NO: 3677 - DNA, 25 bp, Artificial Sequence
  Description of Artificial Sequence: Synthetic oligonucleotide
agtacctgggagctgaatctgtgaa

SEQ ID NO: 3678 - DNA, 25 bp, Artificial Sequence
  Description of Artificial Sequence: Synthetic oligonucleotide
gtacctgggagctgaatctgtgaac

SEQ ID NO: 3679 - DNA, 25 bp, Artificial Sequence
  Description of Artificial Sequence: Synthetic oligonucleotide
tacctgggagctgaatctgtgaaca

SEQ ID NO: 3680 - DNA, 25 bp, Artificial Sequence
  Description of Artificial Sequence: Synthetic oligonucleotide
acctgggagctgaatctgtgaacat

SEQ ID NO: 3681 - DNA, 25 bp, Artificial Sequence
  Description of Artificial Sequence: Synthetic oligonucleotide
cctgggagctgaatctgtgaacatc

SEQ ID NO: 3682 - DNA, 25 bp, Artificial Sequence
  Description of Artificial Sequence: Synthetic oligonucleotide
ctgggagctgaatctgtgaacatca

SEQ ID NO: 3683 - DNA, 25 bp, Artificial Sequence
  Description of Artificial Sequence: Synthetic oligonucleotide
tgggagctgaatctgtgaacatcat

SEQ ID NO: 3684 - DNA, 25 bp, Artificial Sequence
  Description of Artificial Sequence: Synthetic oligonucleotide
gggagctgaatctgtgaacatcatc

SEQ ID NO: 3685 - DNA, 25 bp, Artificial Sequence
  Description of Artificial Sequence: Synthetic oligonucleotide
ggagctgaatctgtgaacatcatca

SEQ ID NO: 3686 - DNA, 25 bp, Artificial Sequence
  Description of Artificial Sequence: Synthetic oligonucleotide
gagctgaatctgtgaacatcatcag

SEQ ID NO: 3687 - DNA, 25 bp, Artificial Sequence
  Description of Artificial Sequence: Synthetic oligonucleotide
agctgaatctgtgaacatcatcaga

SEQ ID NO: 3688 - DNA, 25 bp, Artificial Sequence
  Description of Artificial Sequence: Synthetic oligonucleotide
gctgaatctgtgaacatcatcagag

SEQ ID NO: 3689 - DNA, 25 bp, Artificial Sequence
  Description of Artificial Sequence: Synthetic oligonucleotide
ctgaatctgtgaacatcatcagagg

SEQ ID NO: 3690 - DNA, 25 bp, Artificial Sequence
  Description of Artificial Sequence: Synthetic oligonucleotide
tgaatctgtgaacatcatcagaggc

SEQ ID NO: 3691 - DNA, 25 bp, Artificial Sequence
  Description of Artificial Sequence: Synthetic oligonucleotide
gaatctgtgaacatcatcagaggca

SEQ ID NO: 3692 - DNA, 25 bp, Artificial Sequence
  Description of Artificial Sequence: Synthetic oligonucleotide
aatctgtgaacatcatcagaggcac

SEQ ID NO: 3693 - DNA, 25 bp, Artificial Sequence
  Description of Artificial Sequence: Synthetic oligonucleotide
atctgtgaacatcatcagaggcact

SEQ ID NO: 3694 - DNA, 25 bp, Artificial Sequence
  Description of Artificial Sequence: Synthetic oligonucleotide
tctgtgaacatcatcagaggcactg

SEQ ID NO: 3695 - DNA, 25 bp, Artificial Sequence
  Description of Artificial Sequence: Synthetic oligonucleotide
ctgtgaacatcatcagaggcactga

SEQ ID NO: 3696 - DNA, 25 bp, Artificial Sequence
  Description of Artificial Sequence: Synthetic oligonucleotide
tgtgaacatcatcagaggcactgac

SEQ ID NO: 3697 - DNA, 25 bp, Artificial Sequence
  Description of Artificial Sequence: Synthetic oligonucleotide
gtgaacatcatcagaggcactgact

SEQ ID NO: 3698 - DNA, 25 bp, Artificial Sequence
  Description of Artificial Sequence: Synthetic oligonucleotide
tgaacatcatcagaggcactgacta

SEQ ID NO: 3699 - DNA, 25 bp, Artificial Sequence
  Description of Artificial Sequence: Synthetic oligonucleotide
gaacatcatcagaggcactgactag

SEQ ID NO: 3700 - DNA, 25 bp, Artificial Sequence
  Description of Artificial Sequence: Synthetic oligonucleotide
aacatcatcagaggcactgactaga

SEQ ID NO: 3701 - DNA, 25 bp, Artificial Sequence
  Description of Artificial Sequence: Synthetic oligonucleotide
acatcatcagaggcactgactagat

SEQ ID NO: 3702 - DNA, 25 bp, Artificial Sequence
  Description of Artificial Sequence: Synthetic oligonucleotide
catcatcagaggcactgactagatc

SEQ ID NO: 3703 - DNA, 25 bp, Artificial Sequence
  Description of Artificial Sequence: Synthetic oligonucleotide
atcatcagaggcactgactagatca

SEQ ID NO: 3704 - DNA, 25 bp, Artificial Sequence
  Description of Artificial Sequence: Synthetic oligonucleotide
tcatcagaggcactgactagatcaa

SEQ ID NO: 3705 - DNA, 25 bp, Artificial Sequence
  Description of Artificial Sequence: Synthetic oligonucleotide
catcagaggcactgactagatcaat

SEQ ID NO: 3706 - DNA, 25 bp, Artificial Sequence
  Description of Artificial Sequence: Synthetic oligonucleotide
atcagaggcactgactagatcaatg

SEQ ID NO: 3707 - DNA, 25 bp, Artificial Sequence
  Description of Artificial Sequence: Synthetic oligonucleotide
tcagaggcactgactagatcaatgg

SEQ ID NO: 3708 - DNA, 25 bp, Artificial Sequence
  Description of Artificial Sequence: Synthetic oligonucleotide
cagaggcactgactagatcaatgga

SEQ ID NO: 3709 - DNA, 25 bp, Artificial Sequence
  Description of Artificial Sequence: Synthetic oligonucleotide
agaggcactgactagatcaatggaa

SEQ ID NO: 3710 - DNA, 25 bp, Artificial Sequence
  Description of Artificial Sequence: Synthetic oligonucleotide
gaggcactgactagatcaatggaag

SEQ ID NO: 3711 - DNA, 25 bp, Artificial Sequence
  Description of Artificial Sequence: Synthetic oligonucleotide
aggcactgactagatcaatggaaga

SEQ ID NO: 3712 - DNA, 25 bp, Artificial Sequence
  Description of Artificial Sequence: Synthetic oligonucleotide
ggcactgactagatcaatggaagac

SEQ ID NO: 3713 - DNA, 25 bp, Artificial Sequence
  Description of Artificial Sequence: Synthetic oligonucleotide
gcactgactagatcaatggaagaca

SEQ ID NO: 3714 - DNA, 25 bp, Artificial Sequence
  Description of Artificial Sequence: Synthetic oligonucleotide
cactgactagatcaatggaagacat

SEQ ID NO: 3715 - DNA, 25 bp, Artificial Sequence
  Description of Artificial Sequence: Synthetic oligonucleotide
actgactagatcaatggaagacatg

SEQ ID NO: 3716 - DNA, 25 bp, Artificial Sequence
  Description of Artificial Sequence: Synthetic oligonucleotide
ctgactagatcaatggaagacatgg

SEQ ID NO: 3717 - DNA, 25 bp, Artificial Sequence
  Description of Artificial Sequence: Synthetic oligonucleotide
tgactagatcaatggaagacatgga

SEQ ID NO: 3718 - DNA, 25 bp, Artificial Sequence
  Description of Artificial Sequence: Synthetic oligonucleotide
gactagatcaatggaagacatggag

SEQ ID NO: 3719 - DNA, 25 bp, Artificial Sequence
  Description of Artificial Sequence: Synthetic oligonucleotide
actagatcaatggaagacatggagg

SEQ ID NO: 3720 - DNA, 25 bp, Artificial Sequence
  Description of Artificial Sequence: Synthetic oligonucleotide
ctagatcaatggaagacatggagga

SEQ ID NO: 3721 - DNA, 25 bp, Artificial Sequence
  Description of Artificial Sequence: Synthetic oligonucleotide
tagatcaatggaagacatggaggaa

SEQ ID NO: 3722 - DNA, 25 bp, Artificial Sequence
  Description of Artificial Sequence: Synthetic oligonucleotide
agatcaatggaagacatggaggaag

SEQ ID NO: 3723 - DNA, 25 bp, Artificial Sequence
  Description of Artificial Sequence: Synthetic oligonucleotide
gatcaatggaagacatggaggaaga

SEQ ID NO: 3724 - DNA, 25 bp, Artificial Sequence
  Description of Artificial Sequence: Synthetic oligonucleotide
atcaatggaagacatggaggaagag

SEQ ID NO: 3725 - DNA, 25 bp, Artificial Sequence
  Description of Artificial Sequence: Synthetic oligonucleotide
tcaatggaagacatggaggaagagc

SEQ ID NO: 3726 - DNA, 25 bp, Artificial Sequence
  Description of Artificial Sequence: Synthetic oligonucleotide
caatggaagacatggaggaagagcg

SEQ ID NO: 3727 - DNA, 25 bp, Artificial Sequence
  Description of Artificial Sequence: Synthetic oligonucleotide
aatggaagacatggaggaagagcga

SEQ ID NO: 3728 - DNA, 25 bp, Artificial Sequence
  Description of Artificial Sequence: Synthetic oligonucleotide
atggaagacatggaggaagagcgac

SEQ ID NO: 3729 - DNA, 25 bp, Artificial Sequence
  Description of Artificial Sequence: Synthetic oligonucleotide
tggaagacatggaggaagagcgact

SEQ ID NO: 3730 - DNA, 25 bp, Artificial Sequence
  Description of Artificial Sequence: Synthetic oligonucleotide
ggaagacatggaggaagagcgacta

SEQ ID NO: 3731 - DNA, 25 bp, Artificial Sequence
  Description of Artificial Sequence: Synthetic oligonucleotide
gaagacatggaggaagagcgactat

SEQ ID NO: 3732 - DNA, 25 bp, Artificial Sequence
  Description of Artificial Sequence: Synthetic oligonucleotide
aagacatggaggaagagcgactata

SEQ ID NO: 3733 - DNA, 25 bp, Artificial Sequence
  Description of Artificial Sequence: Synthetic oligonucleotide
agacatggaggaagagcgactatag

SEQ ID NO: 3734 - DNA, 25 bp, Artificial Sequence
  Description of Artificial Sequence: Synthetic oligonucleotide
gacatggaggaagagcgactatagg

SEQ ID NO: 3735 - DNA, 25 bp, Artificial Sequence
  Description of Artificial Sequence: Synthetic oligonucleotide
acatggaggaagagcgactataggg

SEQ ID NO: 3736 - DNA, 25 bp, Artificial Sequence
  Description of Artificial Sequence: Synthetic oligonucleotide
catggaggaagagcgactatagggc

SEQ ID NO: 3737 - DNA, 25 bp, Artificial Sequence
  Description of Artificial Sequence: Synthetic oligonucleotide
atggaggaagagcgactatagggct

SEQ ID NO: 3738 - DNA, 25 bp, Artificial Sequence
  Description of Artificial Sequence: Synthetic oligonucleotide
tggaggaagagcgactatagggcta

SEQ ID NO: 3739 - DNA, 25 bp, Artificial Sequence
  Description of Artificial Sequence: Synthetic oligonucleotide
ggaggaagagcgactatagggctac

SEQ ID NO: 3740 - DNA, 25 bp, Artificial Sequence
  Description of Artificial Sequence: Synthetic oligonucleotide
gaggaagagcgactatagggctacc

SEQ ID NO: 3741 - DNA, 25 bp, Artificial Sequence
  Description of Artificial Sequence: Synthetic oligonucleotide
aggaagagcgactatagggctacca

SEQ ID NO: 3742 - DNA, 25 bp, Artificial Sequence
  Description of Artificial Sequence: Synthetic oligonucleotide
ggaagagcgactatagggctaccag

SEQ ID NO: 3743 - DNA, 25 bp, Artificial Sequence
  Description of Artificial Sequence: Synthetic oligonucleotide
gaagagcgactatagggctaccaga

SEQ ID NO: 3744 - DNA, 25 bp, Artificial Sequence
  Description of Artificial Sequence: Synthetic oligonucleotide
aagagcgactatagggctaccagag

SEQ ID NO: 3745 - DNA, 25 bp, Artificial Sequence
  Description of Artificial Sequence: Synthetic oligonucleotide
agagcgactatagggctaccagaga

SEQ ID NO: 3746 - DNA, 25 bp, Artificial Sequence
  Description of Artificial Sequence: Synthetic oligonucleotide
gagcgactatagggctaccagagac

SEQ ID NO: 3747 - DNA, 25 bp, Artificial Sequence
  Description of Artificial Sequence: Synthetic oligonucleotide
agcgactatagggctaccagagaca

SEQ ID NO: 3748 - DNA, 25 bp, Artificial Sequence
  Description of Artificial Sequence: Synthetic oligonucleotide
gcgactatagggctaccagagacag

SEQ ID NO: 3749 - DNA, 25 bp, Artificial Sequence
  Description of Artificial Sequence: Synthetic oligonucleotide
cgactatagggctaccagagacaga

SEQ ID NO: 3750 - DNA, 25 bp, Artificial Sequence
  Description of Artificial Sequence: Synthetic oligonucleotide
gactatagggctaccagagacagac

SEQ ID NO: 3751 - DNA, 25 bp, Artificial Sequence
  Description of Artificial Sequence: Synthetic oligonucleotide
actatagggctaccagagacagaca

SEQ ID NO: 3752 - DNA, 25 bp, Artificial Sequence
  Description of Artificial Sequence: Synthetic oligonucleotide
ctatagggctaccagagacagacaa

SEQ ID NO: 3753 - DNA, 25 bp, Artificial Sequence
  Description of Artificial Sequence: Synthetic oligonucleotide
tatagggctaccagagacagacaaa

SEQ ID NO: 3754 - DNA, 25 bp, Artificial Sequence
  Description of Artificial Sequence: Synthetic oligonucleotide
atagggctaccagagacagacaaag

SEQ ID NO: 3755 - DNA, 25 bp, Artificial Sequence
  Description of Artificial Sequence: Synthetic oligonucleotide
tagggctaccagagacagacaaaga

SEQ ID NO: 3756 - DNA, 25 bp, Artificial Sequence
  Description of Artificial Sequence: Synthetic oligonucleotide
agggctaccagagacagacaaagaa

SEQ ID NO: 3757 - DNA, 25 bp, Artificial Sequence
  Description of Artificial Sequence: Synthetic oligonucleotide
gggctaccagagacagacaaagaaa

SEQ ID NO: 3758 - DNA, 25 bp, Artificial Sequence
  Description of Artificial Sequence: Synthetic oligonucleotide
ggctaccagagacagacaaagaaaa

SEQ ID NO: 3759 - DNA, 25 bp, Artificial Sequence
  Description of Artificial Sequence: Synthetic oligonucleotide
gctaccagagacagacaaagaaaaa

SEQ ID NO: 3760 - DNA, 25 bp, Artificial Sequence
  Description of Artificial Sequence: Synthetic oligonucleotide
ctaccagagacagacaaagaaaaaa

SEQ ID NO: 3761 - DNA, 25 bp, Artificial Sequence
  Description of Artificial Sequence: Synthetic oligonucleotide
taccagagacagacaaagaaaaaac

SEQ ID NO: 3762 - DNA, 25 bp, Artificial Sequence
  Description of Artificial Sequence: Synthetic oligonucleotide
accagagacagacaaagaaaaaacc

SEQ ID NO: 3763 - DNA, 25 bp, Artificial Sequence
  Description of Artificial Sequence: Synthetic oligonucleotide
ccagagacagacaaagaaaaaacca

SEQ ID NO: 3764 - DNA, 25 bp, Artificial Sequence
  Description of Artificial Sequence: Synthetic oligonucleotide
cagagacagacaaagaaaaaaccaa

SEQ ID NO: 3765 - DNA, 25 bp, Artificial Sequence
  Description of Artificial Sequence: Synthetic oligonucleotide
agagacagacaaagaaaaaaccaag

SEQ ID NO: 3766 - DNA, 25 bp, Artificial Sequence
  Description of Artificial Sequence: Synthetic oligonucleotide
gagacagacaaagaaaaaaccaagt

SEQ ID NO: 3767 - DNA, 25 bp, Artificial Sequence
  Description of Artificial Sequence: Synthetic oligonucleotide
agacagacaaagaaaaaaccaagta

SEQ ID NO: 3768 - DNA, 25 bp, Artificial Sequence
  Description of Artificial Sequence: Synthetic oligonucleotide
gacagacaaagaaaaaaccaagtaa

SEQ ID NO: 3769 - DNA, 25 bp, Artificial Sequence
  Description of Artificial Sequence: Synthetic oligonucleotide
acagacaaagaaaaaaccaagtaat

SEQ ID NO: 3770 - DNA, 25 bp, Artificial Sequence
  Description of Artificial Sequence: Synthetic oligonucleotide
cagacaaagaaaaaaccaagtaatc

SEQ ID NO: 3771 - DNA, 25 bp, Artificial Sequence
  Description of Artificial Sequence: Synthetic oligonucleotide
agacaaagaaaaaaccaagtaatca

SEQ ID NO: 3772 - DNA, 25 bp, Artificial Sequence
  Description of Artificial Sequence: Synthetic oligonucleotide
gacaaagaaaaaaccaagtaatcag

SEQ ID NO: 3773 - DNA, 25 bp, Artificial Sequence
  Description of Artificial Sequence: Synthetic oligonucleotide
acaaagaaaaaaccaagtaatcaga

SEQ ID NO: 3774 - DNA, 25 bp, Artificial Sequence
  Description of Artificial Sequence: Synthetic oligonucleotide
caaagaaaaaaccaagtaatcagaa

SEQ ID NO: 3775 - DNA, 25 bp, Artificial Sequence
  Description of Artificial Sequence: Synthetic oligonucleotide
aaagaaaaaaccaagtaatcagaac

SEQ ID NO: 3776 - DNA, 25 bp, Artificial Sequence
  Description of Artificial Sequence: Synthetic oligonucleotide
aagaaaaaaccaagtaatcagaaca

SEQ ID NO: 3777 - DNA, 25 bp, Artificial Sequence
  Description of Artificial Sequence: Synthetic oligonucleotide
agaaaaaaccaagtaatcagaacaa

SEQ ID NO: 3778 - DNA, 25 bp, Artificial Sequence
  Description of Artificial Sequence: Synthetic oligonucleotide
gaaaaaaccaagtaatcagaacaaa

SEQ ID NO: 3779 - DNA, 25 bp, Artificial Sequence
  Description of Artificial Sequence: Synthetic oligonucleotide
aaaaaaccaagtaatcagaacaaag

SEQ ID NO: 3780 - DNA, 25 bp, Artificial Sequence
  Description of Artificial Sequence: Synthetic oligonucleotide
aaaaaccaagtaatcagaacaaagg

SEQ ID NO: 3781 - DNA, 25 bp, Artificial Sequence
  Description of Artificial Sequence: Synthetic oligonucleotide
aaaaccaagtaatcagaacaaaggc

SEQ ID NO: 3782 - DNA, 25 bp, Artificial Sequence
  Description of Artificial Sequence: Synthetic oligonucleotide
aaaccaagtaatcagaacaaaggca

SEQ ID NO: 3783 - DNA, 25 bp, Artificial Sequence
  Description of Artificial Sequence: Synthetic oligonucleotide
aaccaagtaatcagaacaaaggcac

SEQ ID NO: 3784 - DNA, 25 bp, Artificial Sequence
  Description of Artificial Sequence: Synthetic oligonucleotide
accaagtaatcagaacaaaggcaca

SEQ ID NO: 3785 - DNA, 25 bp, Artificial Sequence
  Description of Artificial Sequence: Synthetic oligonucleotide
ccaagtaatcagaacaaaggcacaa

SEQ ID NO: 3786 - DNA, 25 bp, Artificial Sequence
  Description of Artificial Sequence: Synthetic oligonucleotide
ctataaggagacagcctctactctt

SEQ ID NO: 3787 - DNA, 25 bp, Artificial Sequence
  Description of Artificial Sequence: Synthetic oligonucleotide
tataaggagacagcctctactcttc

SEQ ID NO: 3788 - DNA, 25 bp, Artificial Sequence
  Description of Artificial Sequence: Synthetic oligonucleotide
ataaggagacagcctctactcttcc

SEQ ID NO: 3789 - DNA, 25 bp, Artificial Sequence
  Description of Artificial Sequence: Synthetic oligonucleotide
taaggagacagcctctactcttcca

SEQ ID NO: 3790 - DNA, 25 bp, Artificial Sequence
  Description of Artificial Sequence: Synthetic oligonucleotide
aaggagacagcctctactcttccat

SEQ ID NO: 3791 - DNA, 25 bp, Artificial Sequence
  Description of Artificial Sequence: Synthetic oligonucleotide
aggagacagcctctactcttccata

SEQ ID NO: 3792 - DNA, 25 bp, Artificial Sequence
  Description of Artificial Sequence: Synthetic oligonucleotide
ggagacagcctctactcttccatag

SEQ ID NO: 3793 - DNA, 25 bp, Artificial Sequence
  Description of Artificial Sequence: Synthetic oligonucleotide
gagacagcctctactcttccatagc

SEQ ID NO: 3794 - DNA, 25 bp, Artificial Sequence
  Description of Artificial Sequence: Synthetic oligonucleotide
agacagcctctactcttccatagct

SEQ ID NO: 3795 - DNA, 25 bp, Artificial Sequence
  Description of Artificial Sequence: Synthetic oligonucleotide
gacagcctctactcttccatagctc

SEQ ID NO: 3796 - DNA, 25 bp, Artificial Sequence
  Description of Artificial Sequence: Synthetic oligonucleotide
acagcctctactcttccatagctca

SEQ ID NO: 3797 - DNA, 25 bp, Artificial Sequence
  Description of Artificial Sequence: Synthetic oligonucleotide
cagcctctactcttccatagctcag

SEQ ID NO: 3798 - DNA, 25 bp, Artificial Sequence
  Description of Artificial Sequence: Synthetic oligonucleotide
agcctctactcttccatagctcagt

SEQ ID NO: 3799 - DNA, 25 bp, Artificial Sequence
  Description of Artificial Sequence: Synthetic oligonucleotide
gcctctactcttccatagctcagtt

SEQ ID NO: 3800 - DNA, 25 bp, Artificial Sequence
  Description of Artificial Sequence: Synthetic oligonucleotide
cctctactcttccatagctcagttt

SEQ ID NO: 3801 - DNA, 25 bp, Artificial Sequence
  Description of Artificial Sequence: Synthetic oligonucleotide
ctctactcttccatagctcagtttt

SEQ ID NO: 3802 - DNA, 25 bp, Artificial Sequence
  Description of Artificial Sequence: Synthetic oligonucleotide
tctactcttccatagctcagttttt

SEQ ID NO: 3803 - DNA, 25 bp, Artificial Sequence
  Description of Artificial Sequence: Synthetic oligonucleotide
ctactcttccatagctcagtttttc

SEQ ID NO: 3804 - DNA, 25 bp, Artificial Sequence
  Description of Artificial Sequence: Synthetic oligonucleotide
tactcttccatagctcagtttttcc

SEQ ID NO: 3805 - DNA, 25 bp, Artificial Sequence
  Description of Artificial Sequence: Synthetic oligonucleotide
actcttccatagctcagtttttcca

SEQ ID NO: 3806 - DNA, 25 bp, Artificial Sequence
  Description of Artificial Sequence: Synthetic oligonucleotide
ctcttccatagctcagtttttccaa

SEQ ID NO: 3807 - DNA, 25 bp, Artificial Sequence
  Description of Artificial Sequence: Synthetic oligonucleotide
tcttccatagctcagtttttccaaa

SEQ ID NO: 3808 - DNA, 25 bp, Artificial Sequence
  Description of Artificial Sequence: Synthetic oligonucleotide
cttccatagctcagtttttccaaac

SEQ ID NO: 3809 - DNA, 25 bp, Artificial Sequence
  Description of Artificial Sequence: Synthetic oligonucleotide
ttccatagctcagtttttccaaact

SEQ ID NO: 3810 - DNA, 25 bp, Artificial Sequence
  Description of Artificial Sequence: Synthetic oligonucleotide
tccatagctcagtttttccaaactt

SEQ ID NO: 3811 - DNA, 25 bp, Artificial Sequence
  Description of Artificial Sequence: Synthetic oligonucleotide
ccatagctcagtttttccaaactta

SEQ ID NO: 3812 - DNA, 25 bp, Artificial Sequence
  Description of Artificial Sequence: Synthetic oligonucleotide
catagctcagtttttccaaacttac

SEQ ID NO: 3813 - DNA, 25 bp, Artificial Sequence
  Description of Artificial Sequence: Synthetic oligonucleotide
atagctcagtttttccaaacttact

SEQ ID NO: 3814 - DNA, 25 bp, Artificial Sequence
  Description of Artificial Sequence: Synthetic oligonucleotide
tagctcagtttttccaaacttactg

SEQ ID NO: 3815 - DNA, 25 bp, Artificial Sequence
  Description of Artificial Sequence: Synthetic oligonucleotide
agctcagtttttccaaacttactgt

SEQ ID NO: 3816 - DNA, 25 bp, Artificial Sequence
  Description of Artificial Sequence: Synthetic oligonucleotide
gctcagtttttccaaacttactgtt

SEQ ID NO: 3817 - DNA, 25 bp, Artificial Sequence
  Description of Artificial Sequence: Synthetic oligonucleotide
ctcagtttttccaaacttactgttt

SEQ ID NO: 3818 - DNA, 25 bp, Artificial Sequence
  Description of Artificial Sequence: Synthetic oligonucleotide
tcagtttttccaaacttactgtttt

SEQ ID NO: 3819 - DNA, 25 bp, Artificial Sequence
  Description of Artificial Sequence: Synthetic oligonucleotide
cagtttttccaaacttactgttttc

SEQ ID NO: 3820 - DNA, 25 bp, Artificial Sequence
  Description of Artificial Sequence: Synthetic oligonucleotide
agtttttccaaacttactgttttcc

SEQ ID NO: 3821 - DNA, 25 bp, Artificial Sequence
  Description of Artificial Sequence: Synthetic oligonucleotide
gtttttccaaacttactgttttcct

SEQ ID NO: 3822 - DNA, 25 bp, Artificial Sequence
  Description of Artificial Sequence: Synthetic oligonucleotide
tttttccaaacttactgttttcctg

SEQ ID NO: 3823 - DNA, 25 bp, Artificial Sequence
  Description of Artificial Sequence: Synthetic oligonucleotide
ttttccaaacttactgttttcctgc

SEQ ID NO: 3824 - DNA, 25 bp, Artificial Sequence
  Description of Artificial Sequence: Synthetic oligonucleotide
tttccaaacttactgttttcctgca

SEQ ID NO: 3825 - DNA, 25 bp, Artificial Sequence
  Description of Artificial Sequence: Synthetic oligonucleotide
ttccaaacttactgttttcctgcac

SEQ ID NO: 3826 - DNA, 25 bp, Artificial Sequence
  Description of Artificial Sequence: Synthetic oligonucleotide
tccaaacttactgttttcctgcacc

SEQ ID NO: 3827 - DNA, 25 bp, Artificial Sequence
  Description of Artificial Sequence: Synthetic oligonucleotide
ccaaacttactgttttcctgcaccc

SEQ ID NO: 3828 - DNA, 25 bp, Artificial Sequence
  Description of Artificial Sequence: Synthetic oligonucleotide
caaacttactgttttcctgcaccct

SEQ ID NO: 3829 - DNA, 25 bp, Artificial Sequence
  Description of Artificial Sequence: Synthetic oligonucleotide
aaacttactgttttcctgcaccctg

SEQ ID NO: 3830 - DNA, 25 bp, Artificial Sequence
  Description of Artificial Sequence: Synthetic oligonucleotide
aacttactgttttcctgcaccctgg

SEQ ID NO: 3831 - DNA, 25 bp, Artificial Sequence
  Description of Artificial Sequence: Synthetic oligonucleotide
acttactgttttcctgcaccctggc

SEQ ID NO: 3832 - DNA, 25 bp, Artificial Sequence
  Description of Artificial Sequence: Synthetic oligonucleotide
cttactgttttcctgcaccctggcc

SEQ ID NO: 3833 - DNA, 25 bp, Artificial Sequence
  Description of Artificial Sequence: Synthetic oligonucleotide
ttactgttttcctgcaccctggcca

SEQ ID NO: 3834 - DNA, 25 bp, Artificial Sequence
  Description of Artificial Sequence: Synthetic oligonucleotide
tactgttttcctgcaccctggccac

SEQ ID NO: 3835 - DNA, 25 bp, Artificial Sequence
  Description of Artificial Sequence: Synthetic oligonucleotide
actgttttcctgcaccctggccacg

SEQ ID NO: 3836 - DNA, 25 bp, Artificial Sequence
  Description of Artificial Sequence: Synthetic oligonucleotide
ctgttttcctgcaccctggccacga

SEQ ID NO: 3837 - DNA, 25 bp, Artificial Sequence
  Description of Artificial Sequence: Synthetic oligonucleotide
tgttttcctgcaccctggccacgaa

SEQ ID NO: 3838 - DNA, 25 bp, Artificial Sequence
  Description of Artificial Sequence: Synthetic oligonucleotide
gttttcctgcaccctggccacgaag

SEQ ID NO: 3839 - DNA, 25 bp, Artificial Sequence
  Description of Artificial Sequence: Synthetic oligonucleotide
ttttcctgcaccctggccacgaagc

SEQ ID NO: 3840 - DNA, 25 bp, Artificial Sequence
  Description of Artificial Sequence: Synthetic oligonucleotide
tttcctgcaccctggccacgaagcc

SEQ ID NO: 3841 - DNA, 25 bp, Artificial Sequence
  Description of Artificial Sequence: Synthetic oligonucleotide
ttcctgcaccctggccacgaagcct

SEQ ID NO: 3842 - DNA, 25 bp, Artificial Sequence
  Description of Artificial Sequence: Synthetic oligonucleotide
tcctgcaccctggccacgaagcctg

SEQ ID NO: 3843 - DNA, 25 bp, Artificial Sequence
  Description of Artificial Sequence: Synthetic oligonucleotide
cctgcaccctggccacgaagcctgt

SEQ ID NO: 3844 - DNA, 25 bp, Artificial Sequence
  Description of Artificial Sequence: Synthetic oligonucleotide
ctgcaccctggccacgaagcctgtg

SEQ ID NO: 3845 - DNA, 25 bp, Artificial Sequence
  Description of Artificial Sequence: Synthetic oligonucleotide
tgcaccctggccacgaagcctgtga

SEQ ID NO: 3846 - DNA, 25 bp, Artificial Sequence
  Description of Artificial Sequence: Synthetic oligonucleotide
gcaccctggccacgaagcctgtgag

SEQ ID NO: 3847 - DNA, 25 bp, Artificial Sequence
  Description of Artificial Sequence: Synthetic oligonucleotide
caccctggccacgaagcctgtgaga

SEQ ID NO: 3848 - DNA, 25 bp, Artificial Sequence
  Description of Artificial Sequence: Synthetic oligonucleotide
accctggccacgaagcctgtgagag

SEQ ID NO: 3849 - DNA, 25 bp, Artificial Sequence
  Description of Artificial Sequence: Synthetic oligonucleotide
ccctggccacgaagcctgtgagagg

SEQ ID NO: 3850 - DNA, 25 bp, Artificial Sequence
  Description of Artificial Sequence: Synthetic oligonucleotide
cctggccacgaagcctgtgagaggt

SEQ ID NO: 3851 - DNA, 25 bp, Artificial Sequence
  Description of Artificial Sequence: Synthetic oligonucleotide
ctggccacgaagcctgtgagaggta

SEQ ID NO: 3852 - DNA, 25 bp, Artificial Sequence
  Description of Artificial Sequence: Synthetic oligonucleotide
tggccacgaagcctgtgagaggtat

SEQ ID NO: 3853 - DNA, 25 bp, Artificial Sequence
  Description of Artificial Sequence: Synthetic oligonucleotide
ggccacgaagcctgtgagaggtatc

SEQ ID NO: 3854 - DNA, 25 bp, Artificial Sequence
  Description of Artificial Sequence: Synthetic oligonucleotide
gccacgaagcctgtgagaggtatct

SEQ ID NO: 3855 - DNA, 25 bp, Artificial Sequence
  Description of Artificial Sequence: Synthetic oligonucleotide
ccacgaagcctgtgagaggtatctg

SEQ ID NO: 3856 - DNA, 25 bp, Artificial Sequence
  Description of Artificial Sequence: Synthetic oligonucleotide
cacgaagcctgtgagaggtatctgt

SEQ ID NO: 3857 - DNA, 25 bp, Artificial Sequence
  Description of Artificial Sequence: Synthetic oligonucleotide
acgaagcctgtgagaggtatctgtg

SEQ ID NO: 3858 - DNA, 25 bp, Artificial Sequence
  Description of Artificial Sequence: Synthetic oligonucleotide
cgaagcctgtgagaggtatctgtgg

SEQ ID NO: 3859 - DNA, 25 bp, Artificial Sequence
  Description of Artificial Sequence: Synthetic oligonucleotide
gaagcctgtgagaggtatctgtgga

SEQ ID NO: 3860 - DNA, 25 bp, Artificial Sequence
  Description of Artificial Sequence: Synthetic oligonucleotide
aagcctgtgagaggtatctgtggag

SEQ ID NO: 3861 - DNA, 25 bp, Artificial Sequence
  Description of Artificial Sequence: Synthetic oligonucleotide
agcctgtgagaggtatctgtggagt

SEQ ID NO: 3862 - DNA, 25 bp, Artificial Sequence
  Description of Artificial Sequence: Synthetic oligonucleotide
gcctgtgagaggtatctgtggagtc

SEQ ID NO: 3863 - DNA, 25 bp, Artificial Sequence
  Description of Artificial Sequence: Synthetic oligonucleotide
cctgtgagaggtatctgtggagtca

SEQ ID NO: 3864 - DNA, 25 bp, Artificial Sequence
  Description of Artificial Sequence: Synthetic oligonucleotide
ctgtgagaggtatctgtggagtcaa

SEQ ID NO: 3865 - DNA, 25 bp, Artificial Sequence
  Description of Artificial Sequence: Synthetic oligonucleotide
tgtgagaggtatctgtggagtcaac

SEQ ID NO: 3866 - DNA, 25 bp, Artificial Sequence
  Description of Artificial Sequence: Synthetic oligonucleotide
gtgagaggtatctgtggagtcaact

SEQ ID NO: 3867 - DNA, 25 bp, Artificial Sequence
  Description of Artificial Sequence: Synthetic oligonucleotide
tgagaggtatctgtggagtcaactg

SEQ ID NO: 3868 - DNA, 25 bp, Artificial Sequence
  Description of Artificial Sequence: Synthetic oligonucleotide
gagaggtatctgtggagtcaactga

SEQ ID NO: 3869 - DNA, 25 bp, Artificial Sequence
  Description of Artificial Sequence: Synthetic oligonucleotide
agaggtatctgtggagtcaactgag

SEQ ID NO: 3870 - DNA, 25 bp, Artificial Sequence
  Description of Artificial Sequence: Synthetic oligonucleotide
gaggtatctgtggagtcaactgagg

SEQ ID NO: 3871 - DNA, 25 bp, Artificial Sequence
  Description of Artificial Sequence: Synthetic oligonucleotide
aggtatctgtggagtcaactgaggc

SEQ ID NO: 3872 - DNA, 25 bp, Artificial Sequence
  Description of Artificial Sequence: Synthetic oligonucleotide
ggtatctgtggagtcaactgaggca

SEQ ID NO: 3873 - DNA, 25 bp, Artificial Sequence
  Description of Artificial Sequence: Synthetic oligonucleotide
gtatctgtggagtcaactgaggcat

SEQ ID NO: 3874 - DNA, 25 bp, Artificial Sequence
  Description of Artificial Sequence: Synthetic oligonucleotide
tatctgtggagtcaactgaggcata

SEQ ID NO: 3875 - DNA, 25 bp, Artificial Sequence
  Description of Artificial Sequence: Synthetic oligonucleotide
atctgtggagtcaactgaggcatag

SEQ ID NO: 3876 - DNA, 25 bp, Artificial Sequence
  Description of Artificial Sequence: Synthetic oligonucleotide
tctgtggagtcaactgaggcatagg

SEQ ID NO: 3877 - DNA, 25 bp, Artificial Sequence
  Description of Artificial Sequence: Synthetic oligonucleotide
ctgtggagtcaactgaggcataggg

SEQ ID NO: 3878 - DNA, 25 bp, Artificial Sequence
  Description of Artificial Sequence: Synthetic oligonucleotide
tgtggagtcaactgaggcatagggg

SEQ ID NO: 3879 - DNA, 25 bp, Artificial Sequence
  Description of Artificial Sequence: Synthetic oligonucleotide
gtggagtcaactgaggcataggggg

SEQ ID NO: 3880 - DNA, 25 bp, Artificial Sequence
  Description of Artificial Sequence: Synthetic oligonucleotide
tggagtcaactgaggcataggggga

SEQ ID NO: 3881 - DNA, 25 bp, Artificial Sequence
  Description of Artificial Sequence: Synthetic oligonucleotide
ggagtcaactgaggcatagggggag

SEQ ID NO: 3882 - DNA, 25 bp, Artificial Sequence
  Description of Artificial Sequence: Synthetic oligonucleotide
gagtcaactgaggcatagggggagg

SEQ ID NO: 3883 - DNA, 25 bp, Artificial Sequence
  Description of Artificial Sequence: Synthetic oligonucleotide
agtcaactgaggcatagggggaggg

SEQ ID NO: 3884 - DNA, 25 bp, Artificial Sequence
  Description of Artificial Sequence: Synthetic oligonucleotide
gtcaactgaggcatagggggagggg

SEQ ID NO: 3885 - DNA, 25 bp, Artificial Sequence
  Description of Artificial Sequence: Synthetic oligonucleotide
tcaactgaggcatagggggaggggg

SEQ ID NO: 3886 - DNA, 25 bp, Artificial Sequence
  Description of Artificial Sequence: Synthetic oligonucleotide
caactgaggcatagggggagggggt

SEQ ID NO: 3887 - DNA, 25 bp, Artificial Sequence
  Description of Artificial Sequence: Synthetic oligonucleotide
aactgaggcatagggggagggggtg

SEQ ID NO: 3888 - DNA, 25 bp, Artificial Sequence
  Description of Artificial Sequence: Synthetic oligonucleotide
actgaggcatagggggagggggtgg

SEQ ID NO: 3889 - DNA, 25 bp, Artificial Sequence
  Description of Artificial Sequence: Synthetic oligonucleotide
ctgaggcatagggggagggggtgga

SEQ ID NO: 3890 - DNA, 25 bp, Artificial Sequence
  Description of Artificial Sequence: Synthetic oligonucleotide
tgaggcatagggggagggggtggag

SEQ ID NO: 3891 - DNA, 25 bp, Artificial Sequence
  Description of Artificial Sequence: Synthetic oligonucleotide
gaggcatagggggagggggtggagc

SEQ ID NO: 3892 - DNA, 25 bp, Artificial Sequence
  Description of Artificial Sequence: Synthetic oligonucleotide
aggcatagggggagggggtggagca

SEQ ID NO: 3893 - DNA, 25 bp, Artificial Sequence
  Description of Artificial Sequence: Synthetic oligonucleotide
ggcatagggggagggggtggagcaa

SEQ ID NO: 3894 - DNA, 25 bp, Artificial Sequence
  Description of Artificial Sequence: Synthetic oligonucleotide
gcatagggggagggggtggagcaat

SEQ ID NO: 3895 - DNA, 25 bp, Artificial Sequence
  Description of Artificial Sequence: Synthetic oligonucleotide
catagggggagggggtggagcaata

SEQ ID NO: 3896 - DNA, 25 bp, Artificial Sequence
  Description of Artificial Sequence: Synthetic oligonucleotide
atagggggagggggtggagcaatag

SEQ ID NO: 3897 - DNA, 25 bp, Artificial Sequence
  Description of Artificial Sequence: Synthetic oligonucleotide
tagggggagggggtggagcaataga

SEQ ID NO: 3898 - DNA, 25 bp, Artificial Sequence
  Description of Artificial Sequence: Synthetic oligonucleotide
agggggagggggtggagcaatagaa

SEQ ID NO: 3899 - DNA, 25 bp, Artificial Sequence
  Description of Artificial Sequence: Synthetic oligonucleotide
gggggagggggtggagcaatagaaa

SEQ ID NO: 3900 - DNA, 25 bp, Artificial Sequence
  Description of Artificial Sequence: Synthetic oligonucleotide
ggggagggggtggagcaatagaaac

SEQ ID NO: 3901 - DNA, 25 bp, Artificial Sequence
  Description of Artificial Sequence: Synthetic oligonucleotide
gggagggggtggagcaatagaaact

SEQ ID NO: 3902 - DNA, 25 bp, Artificial Sequence
  Description of Artificial Sequence: Synthetic oligonucleotide
ggagggggtggagcaatagaaactg

SEQ ID NO: 3903 - DNA, 25 bp, Artificial Sequence
  Description of Artificial Sequence: Synthetic oligonucleotide
gagggggtggagcaatagaaactgg

SEQ ID NO: 3904 - DNA, 25 bp, Artificial Sequence
  Description of Artificial Sequence: Synthetic oligonucleotide
agggggtggagcaatagaaactggt

SEQ ID NO: 3905 - DNA, 25 bp, Artificial Sequence
  Description of Artificial Sequence: Synthetic oligonucleotide
gggggtggagcaatagaaactggta

SEQ ID NO: 3906 - DNA, 25 bp, Artificial Sequence
  Description of Artificial Sequence: Synthetic oligonucleotide
ggggtggagcaatagaaactggtag

SEQ ID NO: 3907 - DNA, 25 bp, Artificial Sequence
  Description of Artificial Sequence: Synthetic oligonucleotide
gggtggagcaatagaaactggtagc

SEQ ID NO: 3908 - DNA, 25 bp, Artificial Sequence
  Description of Artificial Sequence: Synthetic oligonucleotide
ggtggagcaatagaaactggtagca

SEQ ID NO: 3909 - DNA, 25 bp, Artificial Sequence
  Description of Artificial Sequence: Synthetic oligonucleotide
gtggagcaatagaaactggtagcaa

SEQ ID NO: 3910 - DNA, 25 bp, Artificial Sequence
  Description of Artificial Sequence: Synthetic oligonucleotide
tggagcaatagaaactggtagcaac

SEQ ID NO: 3911 - DNA, 25 bp, Artificial Sequence
  Description of Artificial Sequence: Synthetic oligonucleotide
ggagcaatagaaactggtagcaaca

SEQ ID NO: 3912 - DNA, 25 bp, Artificial Sequence
  Description of Artificial Sequence: Synthetic oligonucleotide
gagcaatagaaactggtagcaacaa

SEQ ID NO: 3913 - DNA, 25 bp, Artificial Sequence
  Description of Artificial Sequence: Synthetic oligonucleotide
agcaatagaaactggtagcaacaac

SEQ ID NO: 3914 - DNA, 25 bp, Artificial Sequence
  Description of Artificial Sequence: Synthetic oligonucleotide
gcaatagaaactggtagcaacaaca

SEQ ID NO: 3915 - DNA, 25 bp, Artificial Sequence
  Description of Artificial Sequence: Synthetic oligonucleotide
caatagaaactggtagcaacaacac

SEQ ID NO: 3916 - DNA, 25 bp, Artificial Sequence
  Description of Artificial Sequence: Synthetic oligonucleotide
aatagaaactggtagcaacaacaca

SEQ ID NO: 3917 - DNA, 25 bp, Artificial Sequence
  Description of Artificial Sequence: Synthetic oligonucleotide
atagaaactggtagcaacaacacag

SEQ ID NO: 3918 - DNA, 25 bp, Artificial Sequence
  Description of Artificial Sequence: Synthetic oligonucleotide
tagaaactggtagcaacaacacagt

SEQ ID NO: 3919 - DNA, 25 bp, Artificial Sequence
  Description of Artificial Sequence: Synthetic oligonucleotide
agaaactggtagcaacaacacagta

SEQ ID NO: 3920 - DNA, 25 bp, Artificial Sequence
  Description of Artificial Sequence: Synthetic oligonucleotide
gaaactggtagcaacaacacagtat

SEQ ID NO: 3921 - DNA, 25 bp, Artificial Sequence
  Description of Artificial Sequence: Synthetic oligonucleotide
aaactggtagcaacaacacagtatg

SEQ ID NO: 3922 - DNA, 25 bp, Artificial Sequence
  Description of Artificial Sequence: Synthetic oligonucleotide
aactggtagcaacaacacagtatgg

SEQ ID NO: 3923 - DNA, 25 bp, Artificial Sequence
  Description of Artificial Sequence: Synthetic oligonucleotide
actggtagcaacaacacagtatggg

SEQ ID NO: 3924 - DNA, 25 bp, Artificial Sequence
  Description of Artificial Sequence: Synthetic oligonucleotide
ctggtagcaacaacacagtatgggg

SEQ ID NO: 3925 - DNA, 25 bp, Artificial Sequence
  Description of Artificial Sequence: Synthetic oligonucleotide
tggtagcaacaacacagtatggggg

SEQ ID NO: 3926 - DNA, 25 bp, Artificial Sequence
  Description of Artificial Sequence: Synthetic oligonucleotide
ggtagcaacaacacagtatggggga

SEQ ID NO: 3927 - DNA, 25 bp, Artificial Sequence
  Description of Artificial Sequence: Synthetic oligonucleotide
gtagcaacaacacagtatgggggaa

SEQ ID NO: 3928 - DNA, 25 bp, Artificial Sequence
  Description of Artificial Sequence: Synthetic oligonucleotide
tagcaacaacacagtatgggggaag

SEQ ID NO: 3929 - DNA, 25 bp, Artificial Sequence
  Description of Artificial Sequence: Synthetic oligonucleotide
agcaacaacacagtatgggggaagt

SEQ ID NO: 3930 - DNA, 25 bp, Artificial Sequence
  Description of Artificial Sequence: Synthetic oligonucleotide
gcaacaacacagtatgggggaagta

SEQ ID NO: 3931 - DNA, 25 bp, Artificial Sequence
  Description of Artificial Sequence: Synthetic oligonucleotide
caacaacacagtatgggggaagtaa

SEQ ID NO: 3932 - DNA, 25 bp, Artificial Sequence
  Description of Artificial Sequence: Synthetic oligonucleotide
aacaacacagtatgggggaagtaaa

SEQ ID NO: 3933 - DNA, 25 bp, Artificial Sequence
  Description of Artificial Sequence: Synthetic oligonucleotide
acaacacagtatgggggaagtaaaa

SEQ ID NO: 3934 - DNA, 25 bp, Artificial Sequence
  Description of Artificial Sequence: Synthetic oligonucleotide
caacacagtatgggggaagtaaaac

SEQ ID NO: 3935 - DNA, 25 bp, Artificial Sequence
  Description of Artificial Sequence: Synthetic oligonucleotide
aacacagtatgggggaagtaaaaca

SEQ ID NO: 3936 - DNA, 25 bp, Artificial Sequence
  Description of Artificial Sequence: Synthetic oligonucleotide
acacagtatgggggaagtaaaacag

SEQ ID NO: 3937 - DNA, 25 bp, Artificial Sequence
  Description of Artificial Sequence: Synthetic oligonucleotide
cacagtatgggggaagtaaaacaga

SEQ ID NO: 3938 - DNA, 25 bp, Artificial Sequence
  Description of Artificial Sequence: Synthetic oligonucleotide
acagtatgggggaagtaaaacagat

SEQ ID NO: 3939 - DNA, 25 bp, Artificial Sequence
  Description of Artificial Sequence: Synthetic oligonucleotide
cagtatgggggaagtaaaacagata

SEQ ID NO: 3940 - DNA, 25 bp, Artificial Sequence
  Description of Artificial Sequence: Synthetic oligonucleotide
agtatgggggaagtaaaacagataa

SEQ ID NO: 3941 - DNA, 25 bp, Artificial Sequence
  Description of Artificial Sequence: Synthetic oligonucleotide
gtatgggggaagtaaaacagataaa

SEQ ID NO: 3942 - DNA, 25 bp, Artificial Sequence
  Description of Artificial Sequence: Synthetic oligonucleotide
tatgggggaagtaaaacagataaag

SEQ ID NO: 3943 - DNA, 25 bp, Artificial Sequence
  Description of Artificial Sequence: Synthetic oligonucleotide
atgggggaagtaaaacagataaagg

SEQ ID NO: 3944 - DNA, 25 bp, Artificial Sequence
  Description of Artificial Sequence: Synthetic oligonucleotide
tgggggaagtaaaacagataaagga

SEQ ID NO: 3945 - DNA, 25 bp, Artificial Sequence
  Description of Artificial Sequence: Synthetic oligonucleotide
gggggaagtaaaacagataaaggaa

SEQ ID NO: 3946 - DNA, 25 bp, Artificial Sequence
  Description of Artificial Sequence: Synthetic oligonucleotide
ggggaagtaaaacagataaaggaaa

SEQ ID NO: 3947 - DNA, 25 bp, Artificial Sequence
  Description of Artificial Sequence: Synthetic oligonucleotide
gggaagtaaaacagataaaggaaag

SEQ ID NO: 3948 - DNA, 25 bp, Artificial Sequence
  Description of Artificial Sequence: Synthetic oligonucleotide
ggaagtaaaacagataaaggaaaga

SEQ ID NO: 3949 - DNA, 25 bp, Artificial Sequence
  Description of Artificial Sequence: Synthetic oligonucleotide
gaagtaaaacagataaaggaaagaa

SEQ ID NO: 3950 - DNA, 25 bp, Artificial Sequence
  Description of Artificial Sequence: Synthetic oligonucleotide
tacacatttccttcctgacatattt

SEQ ID NO: 3951 - DNA, 25 bp, Artificial Sequence
  Description of Artificial Sequence: Synthetic oligonucleotide
acacatttccttcctgacatatttc

SEQ ID NO: 3952 - DNA, 25 bp, Artificial Sequence
  Description of Artificial Sequence: Synthetic oligonucleotide
cacatttccttcctgacatatttca

SEQ ID NO: 3953 - DNA, 25 bp, Artificial Sequence
  Description of Artificial Sequence: Synthetic oligonucleotide
acatttccttcctgacatatttcaa

SEQ ID NO: 3954 - DNA, 25 bp, Artificial Sequence
  Description of Artificial Sequence: Synthetic oligonucleotide
catttccttcctgacatatttcaag

SEQ ID NO: 3955 - DNA, 25 bp, Artificial Sequence
  Description of Artificial Sequence: Synthetic oligonucleotide
atttccttcctgacatatttcaagc

SEQ ID NO: 3956 - DNA, 25 bp, Artificial Sequence
  Description of Artificial Sequence: Synthetic oligonucleotide
tttccttcctgacatatttcaagct

SEQ ID NO: 3957 - DNA, 25 bp, Artificial Sequence
  Description of Artificial Sequence: Synthetic oligonucleotide
ttccttcctgacatatttcaagctc

SEQ ID NO: 3958 - DNA, 25 bp, Artificial Sequence
  Description of Artificial Sequence: Synthetic oligonucleotide
tccttcctgacatatttcaagctct

SEQ ID NO: 3959 - DNA, 25 bp, Artificial Sequence
  Description of Artificial Sequence: Synthetic oligonucleotide
ccttcctgacatatttcaagctctt

SEQ ID NO: 3960 - DNA, 25 bp, Artificial Sequence
  Description of Artificial Sequence: Synthetic oligonucleotide
cttcctgacatatttcaagctcttc

SEQ ID NO: 3961 - DNA, 25 bp, Artificial Sequence
  Description of Artificial Sequence: Synthetic oligonucleotide
ttcctgacatatttcaagctcttcc

SEQ ID NO: 3962 - DNA, 25 bp, Artificial Sequence
  Description of Artificial Sequence: Synthetic oligonucleotide
tcctgacatatttcaagctcttcct

SEQ ID NO: 3963 - DNA, 25 bp, Artificial Sequence
  Description of Artificial Sequence: Synthetic oligonucleotide
cctgacatatttcaagctcttcctg

SEQ ID NO: 3964 - DNA, 25 bp, Artificial Sequence
  Description of Artificial Sequence: Synthetic oligonucleotide
ctgacatatttcaagctcttcctgt

SEQ ID NO: 3965 - DNA, 25 bp, Artificial Sequence
  Description of Artificial Sequence: Synthetic oligonucleotide
tgacatatttcaagctcttcctgtt

SEQ ID NO: 3966 - DNA, 25 bp, Artificial Sequence
  Description of Artificial Sequence: Synthetic oligonucleotide
gacatatttcaagctcttcctgttc

SEQ ID NO: 3967 - DNA, 25 bp, Artificial Sequence
  Description of Artificial Sequence: Synthetic oligonucleotide
acatatttcaagctcttcctgttcc

SEQ ID NO: 3968 - DNA, 25 bp, Artificial Sequence
  Description of Artificial Sequence: Synthetic oligonucleotide
catatttcaagctcttcctgttcct

SEQ ID NO: 3969 - DNA, 25 bp, Artificial Sequence
  Description of Artificial Sequence: Synthetic oligonucleotide
atatttcaagctcttcctgttcctg

SEQ ID NO: 3970 - DNA, 25 bp, Artificial Sequence
  Description of Artificial Sequence: Synthetic oligonucleotide
tatttcaagctcttcctgttcctgt

SEQ ID NO: 3971 - DNA, 25 bp, Artificial Sequence
  Description of Artificial Sequence: Synthetic oligonucleotide
atttcaagctcttcctgttcctgtt

SEQ ID NO: 3972 - DNA, 25 bp, Artificial Sequence
  Description of Artificial Sequence: Synthetic oligonucleotide
tttcaagctcttcctgttcctgttc

SEQ ID NO: 3973 - DNA, 25 bp, Artificial Sequence
  Description of Artificial Sequence: Synthetic oligonucleotide
ttcaagctcttcctgttcctgttct

SEQ ID NO: 3974 - DNA, 25 bp, Artificial Sequence
  Description of Artificial Sequence: Synthetic oligonucleotide
tcaagctcttcctgttcctgttctc

SEQ ID NO: 3975 - DNA, 25 bp, Artificial Sequence
  Description of Artificial Sequence: Synthetic oligonucleotide
caagctcttcctgttcctgttctca

SEQ ID NO: 3976 - DNA, 25 bp, Artificial Sequence
  Description of Artificial Sequence: Synthetic oligonucleotide
aagctcttcctgttcctgttctcag

SEQ ID NO: 3977 - DNA, 25 bp, Artificial Sequence
  Description of Artificial Sequence: Synthetic oligonucleotide
agctcttcctgttcctgttctcagc

SEQ ID NO: 3978 - DNA, 25 bp, Artificial Sequence
  Description of Artificial Sequence: Synthetic oligonucleotide
gctcttcctgttcctgttctcagca

SEQ ID NO: 3979 - DNA, 25 bp, Artificial Sequence
  Description of Artificial Sequence: Synthetic oligonucleotide
ctcttcctgttcctgttctcagcag

SEQ ID NO: 3980 - DNA, 25 bp, Artificial Sequence
  Description of Artificial Sequence: Synthetic oligonucleotide
tcttcctgttcctgttctcagcagc

SEQ ID NO: 3981 - DNA, 25 bp, Artificial Sequence
  Description of Artificial Sequence: Synthetic oligonucleotide
cttcctgttcctgttctcagcagca

SEQ ID NO: 3982 - DNA, 25 bp, Artificial Sequence
  Description of Artificial Sequence: Synthetic oligonucleotide
ttcctgttcctgttctcagcagcag

SEQ ID NO: 3983 - DNA, 25 bp, Artificial Sequence
  Description of Artificial Sequence: Synthetic oligonucleotide
tcctgttcctgttctcagcagcagg

SEQ ID NO: 3984 - DNA, 25 bp, Artificial Sequence
  Description of Artificial Sequence: Synthetic oligonucleotide
cctgttcctgttctcagcagcaggg

SEQ ID NO: 3985 - DNA, 25 bp, Artificial Sequence
  Description of Artificial Sequence: Synthetic oligonucleotide
ctgttcctgttctcagcagcagggt

SEQ ID NO: 3986 - DNA, 25 bp, Artificial Sequence
  Description of Artificial Sequence: Synthetic oligonucleotide
tgttcctgttctcagcagcagggtg

SEQ ID NO: 3987 - DNA, 25 bp, Artificial Sequence
  Description of Artificial Sequence: Synthetic oligonucleotide
gttcctgttctcagcagcagggtgg

SEQ ID NO: 3988 - DNA, 25 bp, Artificial Sequence
  Description of Artificial Sequence: Synthetic oligonucleotide
ttcctgttctcagcagcagggtggt

SEQ ID NO: 3989 - DNA, 25 bp, Artificial Sequence
  Description of Artificial Sequence: Synthetic oligonucleotide
tcctgttctcagcagcagggtggtg

SEQ ID NO: 3990 - DNA, 25 bp, Artificial Sequence
  Description of Artificial Sequence: Synthetic oligonucleotide
cctgttctcagcagcagggtggtgt

SEQ ID NO: 3991 - DNA, 25 bp, Artificial Sequence
  Description of Artificial Sequence: Synthetic oligonucleotide
ctgttctcagcagcagggtggtgtc

SEQ ID NO: 3992 - DNA, 25 bp, Artificial Sequence
  Description of Artificial Sequence: Synthetic oligonucleotide
tgttctcagcagcagggtggtgtca

SEQ ID NO: 3993 - DNA, 25 bp, Artificial Sequence
  Description of Artificial Sequence: Synthetic oligonucleotide
gttctcagcagcagggtggtgtcac

SEQ ID NO: 3994 - DNA, 25 bp, Artificial Sequence
  Description of Artificial Sequence: Synthetic oligonucleotide
ttctcagcagcagggtggtgtcact

SEQ ID NO: 3995 - DNA, 25 bp, Artificial Sequence
  Description of Artificial Sequence: Synthetic oligonucleotide
tctcagcagcagggtggtgtcactg

SEQ ID NO: 3996 - DNA, 25 bp, Artificial Sequence
  Description of Artificial Sequence: Synthetic oligonucleotide
ctcagcagcagggtggtgtcactgc

SEQ ID NO: 3997 - DNA, 25 bp, Artificial Sequence
  Description of Artificial Sequence: Synthetic oligonucleotide
tcagcagcagggtggtgtcactgct

SEQ ID NO: 3998 - DNA, 25 bp, Artificial Sequence
  Description of Artificial Sequence: Synthetic oligonucleotide
cagcagcagggtggtgtcactgctg

SEQ ID NO: 3999 - DNA, 25 bp, Artificial Sequence
  Description of Artificial Sequence: Synthetic oligonucleotide
agcagcagggtggtgtcactgctgt

SEQ ID NO: 4000 - DNA, 25 bp, Artificial Sequence
  Description of Artificial Sequence: Synthetic oligonucleotide
gcagcagggtggtgtcactgctgtg

SEQ ID NO: 4001 - DNA, 25 bp, Artificial Sequence
  Description of Artificial Sequence: Synthetic oligonucleotide
cagcagggtggtgtcactgctgtgc

SEQ ID NO: 4002 - DNA, 25 bp, Artificial Sequence
  Description of Artificial Sequence: Synthetic oligonucleotide
agcagggtggtgtcactgctgtgca

SEQ ID NO: 4003 - DNA, 25 bp, Artificial Sequence
  Description of Artificial Sequence: Synthetic oligonucleotide
gcagggtggtgtcactgctgtgcag

SEQ ID NO: 4004 - DNA, 25 bp, Artificial Sequence
  Description of Artificial Sequence: Synthetic oligonucleotide
cagggtggtgtcactgctgtgcagt

SEQ ID NO: 4005 - DNA, 25 bp, Artificial Sequence
  Description of Artificial Sequence: Synthetic oligonucleotide
agggtggtgtcactgctgtgcagtt

SEQ ID NO: 4006 - DNA, 25 bp, Artificial Sequence
  Description of Artificial Sequence: Synthetic oligonucleotide
gggtggtgtcactgctgtgcagttg

SEQ ID NO: 4007 - DNA, 25 bp, Artificial Sequence
  Description of Artificial Sequence: Synthetic oligonucleotide
ggtggtgtcactgctgtgcagttgc

SEQ ID NO: 4008 - DNA, 25 bp, Artificial Sequence
  Description of Artificial Sequence: Synthetic oligonucleotide
gtggtgtcactgctgtgcagttgca

SEQ ID NO: 4009 - DNA, 25 bp, Artificial Sequence
  Description of Artificial Sequence: Synthetic oligonucleotide
tggtgtcactgctgtgcagttgcag

SEQ ID NO: 4010 - DNA, 25 bp, Artificial Sequence
  Description of Artificial Sequence: Synthetic oligonucleotide
ggtgtcactgctgtgcagttgcaga

SEQ ID NO: 4011 - DNA, 25 bp, Artificial Sequence
  Description of Artificial Sequence: Synthetic oligonucleotide
gtgtcactgctgtgcagttgcagac

SEQ ID NO: 4012 - DNA, 25 bp, Artificial Sequence
  Description of Artificial Sequence: Synthetic oligonucleotide
tgtcactgctgtgcagttgcagact

SEQ ID NO: 4013 - DNA, 25 bp, Artificial Sequence
  Description of Artificial Sequence: Synthetic oligonucleotide
gtcactgctgtgcagttgcagactg

SEQ ID NO: 4014 - DNA, 25 bp, Artificial Sequence
  Description of Artificial Sequence: Synthetic oligonucleotide
tcactgctgtgcagttgcagactga

SEQ ID NO: 4015 - DNA, 25 bp, Artificial Sequence
  Description of Artificial Sequence: Synthetic oligonucleotide
cactgctgtgcagttgcagactgag

SEQ ID NO: 4016 - DNA, 25 bp, Artificial Sequence
  Description of Artificial Sequence: Synthetic oligonucleotide
actgctgtgcagttgcagactgagg

SEQ ID NO: 4017 - DNA, 25 bp, Artificial Sequence
  Description of Artificial Sequence: Synthetic oligonucleotide
ctgctgtgcagttgcagactgaggc

SEQ ID NO: 4018 - DNA, 25 bp, Artificial Sequence
  Description of Artificial Sequence: Synthetic oligonucleotide
tgctgtgcagttgcagactgaggcc

SEQ ID NO: 4019 - DNA, 25 bp, Artificial Sequence
  Description of Artificial Sequence: Synthetic oligonucleotide
gctgtgcagttgcagactgaggccc

SEQ ID NO: 4020 - DNA, 25 bp, Artificial Sequence
  Description of Artificial Sequence: Synthetic oligonucleotide
ctgtgcagttgcagactgaggccca

SEQ ID NO: 4021 - DNA, 25 bp, Artificial Sequence
  Description of Artificial Sequence: Synthetic oligonucleotide
tgtgcagttgcagactgaggcccag

SEQ ID NO: 4022 - DNA, 25 bp, Artificial Sequence
  Description of Artificial Sequence: Synthetic oligonucleotide
gtgcagttgcagactgaggcccagg

SEQ ID NO: 4023 - DNA, 25 bp, Artificial Sequence
  Description of Artificial Sequence: Synthetic oligonucleotide
tgcagttgcagactgaggcccaggt

SEQ ID NO: 4024 - DNA, 25 bp, Artificial Sequence
  Description of Artificial Sequence: Synthetic oligonucleotide
gcagttgcagactgaggcccaggtg

SEQ ID NO: 4025 - DNA, 25 bp, Artificial Sequence
  Description of Artificial Sequence: Synthetic oligonucleotide
cagttgcagactgaggcccaggtgg

SEQ ID NO: 4026 - DNA, 25 bp, Artificial Sequence
  Description of Artificial Sequence: Synthetic oligonucleotide
agttgcagactgaggcccaggtggc

SEQ ID NO: 4027 - DNA, 25 bp, Artificial Sequence
  Description of Artificial Sequence: Synthetic oligonucleotide
gttgcagactgaggcccaggtggca

SEQ ID NO: 4028 - DNA, 25 bp, Artificial Sequence
  Description of Artificial Sequence: Synthetic oligonucleotide
ttgcagactgaggcccaggtggcat

SEQ ID NO: 4029 - DNA, 25 bp, Artificial Sequence
  Description of Artificial Sequence: Synthetic oligonucleotide
tgcagactgaggcccaggtggcatc

SEQ ID NO: 4030 - DNA, 25 bp, Artificial Sequence
  Description of Artificial Sequence: Synthetic oligonucleotide
gcagactgaggcccaggtggcatcc

SEQ ID NO: 4031 - DNA, 25 bp, Artificial Sequence
  Description of Artificial Sequence: Synthetic oligonucleotide
cagactgaggcccaggtggcatccg

SEQ ID NO: 4032 - DNA, 25 bp, Artificial Sequence
  Description of Artificial Sequence: Synthetic oligonucleotide
agactgaggcccaggtggcatccgc

SEQ ID NO: 4033 - DNA, 25 bp, Artificial Sequence
  Description of Artificial Sequence: Synthetic oligonucleotide
gactgaggcccaggtggcatccgcc

SEQ ID NO: 4034 - DNA, 25 bp, Artificial Sequence
  Description of Artificial Sequence: Synthetic oligonucleotide
actgaggcccaggtggcatccgcct

SEQ ID NO: 4035 - DNA, 25 bp, Artificial Sequence
  Description of Artificial Sequence: Synthetic oligonucleotide
ctgaggcccaggtggcatccgcctc

SEQ ID NO: 4036 - DNA, 25 bp, Artificial Sequence
  Description of Artificial Sequence: Synthetic oligonucleotide
tgaggcccaggtggcatccgcctca

SEQ ID NO: 4037 - DNA, 25 bp, Artificial Sequence
  Description of Artificial Sequence: Synthetic oligonucleotide
gaggcccaggtggcatccgcctcag

SEQ ID NO: 4038 - DNA, 25 bp, Artificial Sequence
  Description of Artificial Sequence: Synthetic oligonucleotide
aggcccaggtggcatccgcctcagg

SEQ ID NO: 4039 - DNA, 25 bp, Artificial Sequence
  Description of Artificial Sequence: Synthetic oligonucleotide
ggcccaggtggcatccgcctcaggc

SEQ ID NO: 4040 - DNA, 25 bp, Artificial Sequence
  Description of Artificial Sequence: Synthetic oligonucleotide
gcccaggtggcatccgcctcaggcc

SEQ ID NO: 4041 - DNA, 25 bp, Artificial Sequence
  Description of Artificial Sequence: Synthetic oligonucleotide
cccaggtggcatccgcctcaggcca

SEQ ID NO: 4042 - DNA, 25 bp, Artificial Sequence
  Description of Artificial Sequence: Synthetic oligonucleotide
ccaggtggcatccgcctcaggccag

SEQ ID NO: 4043 - DNA, 25 bp, Artificial Sequence
  Description of Artificial Sequence: Synthetic oligonucleotide
caggtggcatccgcctcaggccagc

SEQ ID NO: 4044 - DNA, 25 bp, Artificial Sequence
  Description of Artificial Sequence: Synthetic oligonucleotide
aggtggcatccgcctcaggccagca

SEQ ID NO: 4045 - DNA, 25 bp, Artificial Sequence
  Description of Artificial Sequence: Synthetic oligonucleotide
ggtggcatccgcctcaggccagcaa

SEQ ID NO: 4046 - DNA, 25 bp, Artificial Sequence
  Description of Artificial Sequence: Synthetic oligonucleotide
gtggcatccgcctcaggccagcaag

SEQ ID NO: 4047 - DNA, 25 bp, Artificial Sequence
  Description of Artificial Sequence: Synthetic oligonucleotide
tggcatccgcctcaggccagcaagt

SEQ ID NO: 4048 - DNA, 25 bp, Artificial Sequence
  Description of Artificial Sequence: Synthetic oligonucleotide
ggcatccgcctcaggccagcaagtc

SEQ ID NO: 4049 - DNA, 25 bp, Artificial Sequence
  Description of Artificial Sequence: Synthetic oligonucleotide
gcatccgcctcaggccagcaagtcc

SEQ ID NO: 4050 - DNA, 25 bp, Artificial Sequence
  Description of Artificial Sequence: Synthetic oligonucleotide
catccgcctcaggccagcaagtcca

SEQ ID NO: 4051 - DNA, 25 bp, Artificial Sequence
  Description of Artificial Sequence: Synthetic oligonucleotide
atccgcctcaggccagcaagtccag

SEQ ID NO: 4052 - DNA, 25 bp, Artificial Sequence
  Description of Artificial Sequence: Synthetic oligonucleotide
tccgcctcaggccagcaagtccaga

SEQ ID NO: 4053 - DNA, 25 bp, Artificial Sequence
  Description of Artificial Sequence: Synthetic oligonucleotide
ccgcctcaggccagcaagtccagac

SEQ ID NO: 4054 - DNA, 25 bp, Artificial Sequence
  Description of Artificial Sequence: Synthetic oligonucleotide
cgcctcaggccagcaagtccagacc

SEQ ID NO: 4055 - DNA, 25 bp, Artificial Sequence
  Description of Artificial Sequence: Synthetic oligonucleotide
gcctcaggccagcaagtccagaccc

SEQ ID NO: 4056 - DNA, 25 bp, Artificial Sequence
  Description of Artificial Sequence: Synthetic oligonucleotide
cctcaggccagcaagtccagaccct

SEQ ID NO: 4057 - DNA, 25 bp, Artificial Sequence
  Description of Artificial Sequence: Synthetic oligonucleotide
ctcaggccagcaagtccagaccctc

SEQ ID NO: 4058 - DNA, 25 bp, Artificial Sequence
  Description of Artificial Sequence: Synthetic oligonucleotide
tcaggccagcaagtccagaccctcc

SEQ ID NO: 4059 - DNA, 25 bp, Artificial Sequence
  Description of Artificial Sequence: Synthetic oligonucleotide
caggccagcaagtccagaccctcca

SEQ ID NO: 4060 - DNA, 25 bp, Artificial Sequence
  Description of Artificial Sequence: Synthetic oligonucleotide
aggccagcaagtccagaccctccag

SEQ ID NO: 4061 - DNA, 25 bp, Artificial Sequence
  Description of Artificial Sequence: Synthetic oligonucleotide
ggccagcaagtccagaccctccagg

SEQ ID NO: 4062 - DNA, 25 bp, Artificial Sequence
  Description of Artificial Sequence: Synthetic oligonucleotide
gccagcaagtccagaccctccaggt

SEQ ID NO: 4063 - DNA, 25 bp, Artificial Sequence
  Description of Artificial Sequence: Synthetic oligonucleotide
ccagcaagtccagaccctccaggta

SEQ ID NO: 4064 - DNA, 25 bp, Artificial Sequence
  Description of Artificial Sequence: Synthetic oligonucleotide
cagcaagtccagaccctccaggtag

SEQ ID NO: 4065 - DNA, 25 bp, Artificial Sequence
  Description of Artificial Sequence: Synthetic oligonucleotide
agcaagtccagaccctccaggtagt

SEQ ID NO: 4066 - DNA, 25 bp, Artificial Sequence
  Description of Artificial Sequence: Synthetic oligonucleotide
gcaagtccagaccctccaggtagtg

SEQ ID NO: 4067 - DNA, 25 bp, Artificial Sequence
  Description of Artificial Sequence: Synthetic oligonucleotide
caagtccagaccctccaggtagtgg

SEQ ID NO: 4068 - DNA, 25 bp, Artificial Sequence
  Description of Artificial Sequence: Synthetic oligonucleotide
aagtccagaccctccaggtagtggt

SEQ ID NO: 4069 - DNA, 25 bp, Artificial Sequence
  Description of Artificial Sequence: Synthetic oligonucleotide
agtccagaccctccaggtagtggta

SEQ ID NO: 4070 - DNA, 25 bp, Artificial Sequence
  Description of Artificial Sequence: Synthetic oligonucleotide
gtccagaccctccaggtagtggtac

SEQ ID NO: 4071 - DNA, 25 bp, Artificial Sequence
  Description of Artificial Sequence: Synthetic oligonucleotide
tccagaccctccaggtagtggtacc

SEQ ID NO: 4072 - DNA, 25 bp, Artificial Sequence
  Description of Artificial Sequence: Synthetic oligonucleotide
ccagaccctccaggtagtggtaccc

SEQ ID NO: 4073 - DNA, 25 bp, Artificial Sequence
  Description of Artificial Sequence: Synthetic oligonucleotide
cagaccctccaggtagtggtaccct

SEQ ID NO: 4074 - DNA, 25 bp, Artificial Sequence
  Description of Artificial Sequence: Synthetic oligonucleotide
agaccctccaggtagtggtaccctc

SEQ ID NO: 4075 - DNA, 25 bp, Artificial Sequence
  Description of Artificial Sequence: Synthetic oligonucleotide
gaccctccaggtagtggtaccctct

SEQ ID NO: 4076 - DNA, 25 bp, Artificial Sequence
  Description of Artificial Sequence: Synthetic oligonucleotide
accctccaggtagtggtaccctctc

SEQ ID NO: 4077 - DNA, 25 bp, Artificial Sequence
  Description of Artificial Sequence: Synthetic oligonucleotide
ccctccaggtagtggtaccctctct

SEQ ID NO: 4078 - DNA, 25 bp, Artificial Sequence
  Description of Artificial Sequence: Synthetic oligonucleotide
cctccaggtagtggtaccctctctg

SEQ ID NO: 4079 - DNA, 25 bp, Artificial Sequence
  Description of Artificial Sequence: Synthetic oligonucleotide
ctccaggtagtggtaccctctctga

SEQ ID NO: 4080 - DNA, 25 bp, Artificial Sequence
  Description of Artificial Sequence: Synthetic oligonucleotide
tccaggtagtggtaccctctctgat

SEQ ID NO: 4081 - DNA, 25 bp, Artificial Sequence
  Description of Artificial Sequence: Synthetic oligonucleotide
ccaggtagtggtaccctctctgatt

SEQ ID NO: 4082 - DNA, 25 bp, Artificial Sequence
  Description of Artificial Sequence: Synthetic oligonucleotide
caggtagtggtaccctctctgattc

SEQ ID NO: 4083 - DNA, 25 bp, Artificial Sequence
  Description of Artificial Sequence: Synthetic oligonucleotide
aggtagtggtaccctctctgattct

SEQ ID NO: 4084 - DNA, 25 bp, Artificial Sequence
  Description of Artificial Sequence: Synthetic oligonucleotide
ggtagtggtaccctctctgattctc

SEQ ID NO: 4085 - DNA, 25 bp, Artificial Sequence
  Description of Artificial Sequence: Synthetic oligonucleotide
gtagtggtaccctctctgattctct

SEQ ID NO: 4086 - DNA, 25 bp, Artificial Sequence
  Description of Artificial Sequence: Synthetic oligonucleotide
tagtggtaccctctctgattctctg

SEQ ID NO: 4087 - DNA, 25 bp, Artificial Sequence
  Description of Artificial Sequence: Synthetic oligonucleotide
agtggtaccctctctgattctctgt

SEQ ID NO: 4088 - DNA, 25 bp, Artificial Sequence
  Description of Artificial Sequence: Synthetic oligonucleotide
gtggtaccctctctgattctctgtg

SEQ ID NO: 4089 - DNA, 25 bp, Artificial Sequence
  Description of Artificial Sequence: Synthetic oligonucleotide
tggtaccctctctgattctctgtga

SEQ ID NO: 4090 - DNA, 25 bp, Artificial Sequence
  Description of Artificial Sequence: Synthetic oligonucleotide
ggtaccctctctgattctctgtgag

SEQ ID NO: 4091 - DNA, 25 bp, Artificial Sequence
  Description of Artificial Sequence: Synthetic oligonucleotide
gtaccctctctgattctctgtgagc

SEQ ID NO: 4092 - DNA, 25 bp, Artificial Sequence
  Description of Artificial Sequence: Synthetic oligonucleotide
taccctctctgattctctgtgagca

SEQ ID NO: 4093 - DNA, 25 bp, Artificial Sequence
  Description of Artificial Sequence: Synthetic oligonucleotide
accctctctgattctctgtgagcac

SEQ ID NO: 4094 - DNA, 25 bp, Artificial Sequence
  Description of Artificial Sequence: Synthetic oligonucleotide
ccctctctgattctctgtgagcact

SEQ ID NO: 4095 - DNA, 25 bp, Artificial Sequence
  Description of Artificial Sequence: Synthetic oligonucleotide
cctctctgattctctgtgagcactg

SEQ ID NO: 4096 - DNA, 25 bp, Artificial Sequence
  Description of Artificial Sequence: Synthetic oligonucleotide
ctctctgattctctgtgagcactgc

SEQ ID NO: 4097 - DNA, 25 bp, Artificial Sequence
  Description of Artificial Sequence: Synthetic oligonucleotide
tctctgattctctgtgagcactgca

SEQ ID NO: 4098 - DNA, 25 bp, Artificial Sequence
  Description of Artificial Sequence: Synthetic oligonucleotide
ctctgattctctgtgagcactgcat

SEQ ID NO: 4099 - DNA, 25 bp, Artificial Sequence
  Description of Artificial Sequence: Synthetic oligonucleotide
tctgattctctgtgagcactgcatg

SEQ ID NO: 4100 - DNA, 25 bp, Artificial Sequence
  Description of Artificial Sequence: Synthetic oligonucleotide
ctgattctctgtgagcactgcatga

SEQ ID NO: 4101 - DNA, 25 bp, Artificial Sequence
  Description of Artificial Sequence: Synthetic oligonucleotide
tgattctctgtgagcactgcatgaa

SEQ ID NO: 4102 - DNA, 25 bp, Artificial Sequence
  Description of Artificial Sequence: Synthetic oligonucleotide
gattctctgtgagcactgcatgaac

SEQ ID NO: 4103 - DNA, 25 bp, Artificial Sequence
  Description of Artificial Sequence: Synthetic oligonucleotide
attctctgtgagcactgcatgaact

SEQ ID NO: 4104 - DNA, 25 bp, Artificial Sequence
  Description of Artificial Sequence: Synthetic oligonucleotide
ttctctgtgagcactgcatgaactt

SEQ ID NO: 4105 - DNA, 25 bp, Artificial Sequence
  Description of Artificial Sequence: Synthetic oligonucleotide
tctctgtgagcactgcatgaacttc

SEQ ID NO: 4106 - DNA, 25 bp, Artificial Sequence
  Description of Artificial Sequence: Synthetic oligonucleotide
ctctgtgagcactgcatgaacttct

SEQ ID NO: 4107 - DNA, 25 bp, Artificial Sequence
  Description of Artificial Sequence: Synthetic oligonucleotide
tctgtgagcactgcatgaacttctc

SEQ ID NO: 4108 - DNA, 25 bp, Artificial Sequence
  Description of Artificial Sequence: Synthetic oligonucleotide
ctgtgagcactgcatgaacttctcc

SEQ ID NO: 4109 - DNA, 25 bp, Artificial Sequence
  Description of Artificial Sequence: Synthetic oligonucleotide
tgtgagcactgcatgaacttctcct

SEQ ID NO: 4110 - DNA, 25 bp, Artificial Sequence
  Description of Artificial Sequence: Synthetic oligonucleotide
gtgagcactgcatgaacttctcctc

SEQ ID NO: 4111 - DNA, 25 bp, Artificial Sequence
  Description of Artificial Sequence: Synthetic oligonucleotide
tgagcactgcatgaacttctcctct

SEQ ID NO: 4112 - DNA, 25 bp, Artificial Sequence
  Description of Artificial Sequence: Synthetic oligonucleotide
gagcactgcatgaacttctcctctc

SEQ ID NO: 4113 - DNA, 25 bp, Artificial Sequence
  Description of Artificial Sequence: Synthetic oligonucleotide
agcactgcatgaacttctcctctcc

SEQ ID NO: 4114 - DNA, 25 bp, Artificial Sequence
  Description of Artificial Sequence: Synthetic oligonucleotide
ttaccctgccctgcggcggctccgc

SEQ ID NO: 4115 - DNA, 25 bp, Artificial Sequence
  Description of Artificial Sequence: Synthetic oligonucleotide
taccctgccctgcggcggctccgcc

SEQ ID NO: 4116 - DNA, 25 bp, Artificial Sequence
  Description of Artificial Sequence: Synthetic oligonucleotide
accctgccctgcggcggctccgccc

SEQ ID NO: 4117 - DNA, 25 bp, Artificial Sequence
  Description of Artificial Sequence: Synthetic oligonucleotide
ccctgccctgcggcggctccgcccc

SEQ ID NO: 4118 - DNA, 25 bp, Artificial Sequence
  Description of Artificial Sequence: Synthetic oligonucleotide
cctgccctgcggcggctccgcccct

SEQ ID NO: 4119 - DNA, 25 bp, Artificial Sequence
  Description of Artificial Sequence: Synthetic oligonucleotide
ctgccctgcggcggctccgcccctt

SEQ ID NO: 4120 - DNA, 25 bp, Artificial Sequence
  Description of Artificial Sequence: Synthetic oligonucleotide
tgccctgcggcggctccgcccctta

SEQ ID NO: 4121 - DNA, 25 bp, Artificial Sequence
  Description of Artificial Sequence: Synthetic oligonucleotide
gccctgcggcggctccgccccttac

SEQ ID NO: 4122 - DNA, 25 bp, Artificial Sequence
  Description of Artificial Sequence: Synthetic oligonucleotide
ccctgcggcggctccgccccttacc

SEQ ID NO: 4123 - DNA, 25 bp, Artificial Sequence
  Description of Artificial Sequence: Synthetic oligonucleotide
cctgcggcggctccgccccttacct

SEQ ID NO: 4124 - DNA, 25 bp, Artificial Sequence
  Description of Artificial Sequence: Synthetic oligonucleotide
ctgcggcggctccgccccttacctt

SEQ ID NO: 4125 - DNA, 25 bp, Artificial Sequence
  Description of Artificial Sequence: Synthetic oligonucleotide
tgcggcggctccgccccttaccttc

SEQ ID NO: 4126 - DNA, 25 bp, Artificial Sequence
  Description of Artificial Sequence: Synthetic oligonucleotide
gcggcggctccgccccttaccttca

SEQ ID NO: 4127 - DNA, 25 bp, Artificial Sequence
  Description of Artificial Sequence: Synthetic oligonucleotide
cggcggctccgccccttaccttcat

SEQ ID NO: 4128 - DNA, 25 bp, Artificial Sequence
  Description of Artificial Sequence: Synthetic oligonucleotide
ggcggctccgccccttaccttcatg

SEQ ID NO: 4129 - DNA, 25 bp, Artificial Sequence
  Description of Artificial Sequence: Synthetic oligonucleotide
gcggctccgccccttaccttcatgg

SEQ ID NO: 4130 - DNA, 25 bp, Artificial Sequence
  Description of Artificial Sequence: Synthetic oligonucleotide
cggctccgccccttaccttcatgga

SEQ ID NO: 4131 - DNA, 25 bp, Artificial Sequence
  Description of Artificial Sequence: Synthetic oligonucleotide
ggctccgccccttaccttcatggac

SEQ ID NO: 4132 - DNA, 25 bp, Artificial Sequence
  Description of Artificial Sequence: Synthetic oligonucleotide
gctccgccccttaccttcatggacg

SEQ ID NO: 4133 - DNA, 25 bp, Artificial Sequence
  Description of Artificial Sequence: Synthetic oligonucleotide
ctccgccccttaccttcatggacga

SEQ ID NO: 4134 - DNA, 25 bp, Artificial Sequence
  Description of Artificial Sequence: Synthetic oligonucleotide
tccgccccttaccttcatggacgac

SEQ ID NO: 4135 - DNA, 25 bp, Artificial Sequence
  Description of Artificial Sequence: Synthetic oligonucleotide
ccgccccttaccttcatggacgact

SEQ ID NO: 4136 - DNA, 25 bp, Artificial Sequence
  Description of Artificial Sequence: Synthetic oligonucleotide
cgccccttaccttcatggacgactc

SEQ ID NO: 4137 - DNA, 25 bp, Artificial Sequence
  Description of Artificial Sequence: Synthetic oligonucleotide
gccccttaccttcatggacgactca

SEQ ID NO: 4138 - DNA, 25 bp, Artificial Sequence
  Description of Artificial Sequence: Synthetic oligonucleotide
ccccttaccttcatggacgactcag

SEQ ID NO: 4139 - DNA, 25 bp, Artificial Sequence
  Description of Artificial Sequence: Synthetic oligonucleotide
cccttaccttcatggacgactcaga

SEQ ID NO: 4140 - DNA, 25 bp, Artificial Sequence
  Description of Artificial Sequence: Synthetic oligonucleotide
ccttaccttcatggacgactcagag

SEQ ID NO: 4141 - DNA, 25 bp, Artificial Sequence
  Description of Artificial Sequence: Synthetic oligonucleotide
cttaccttcatggacgactcagagg

SEQ ID NO: 4142 - DNA, 25 bp, Artificial Sequence
  Description of Artificial Sequence: Synthetic oligonucleotide
ttaccttcatggacgactcagaggt

SEQ ID NO: 4143 - DNA, 25 bp, Artificial Sequence
  Description of Artificial Sequence: Synthetic oligonucleotide
taccttcatggacgactcagaggtg

SEQ ID NO: 4144 - DNA, 25 bp, Artificial Sequence
  Description of Artificial Sequence: Synthetic oligonucleotide
accttcatggacgactcagaggtgg

SEQ ID NO: 4145 - DNA, 25 bp, Artificial Sequence
  Description of Artificial Sequence: Synthetic oligonucleotide
ccttcatggacgactcagaggtgga

SEQ ID NO: 4146 - DNA, 25 bp, Artificial Sequence
  Description of Artificial Sequence: Synthetic oligonucleotide
cttcatggacgactcagaggtggag

SEQ ID NO: 4147 - DNA, 25 bp, Artificial Sequence
  Description of Artificial Sequence: Synthetic oligonucleotide
ttcatggacgactcagaggtggagt

SEQ ID NO: 4148 - DNA, 25 bp, Artificial Sequence
  Description of Artificial Sequence: Synthetic oligonucleotide
tcatggacgactcagaggtggagtc

SEQ ID NO: 4149 - DNA, 25 bp, Artificial Sequence
  Description of Artificial Sequence: Synthetic oligonucleotide
catggacgactcagaggtggagtcg

SEQ ID NO: 4150 - DNA, 25 bp, Artificial Sequence
  Description of Artificial Sequence: Synthetic oligonucleotide
atggacgactcagaggtggagtcga

SEQ ID NO: 4151 - DNA, 25 bp, Artificial Sequence
  Description of Artificial Sequence: Synthetic oligonucleotide
tggacgactcagaggtggagtcgac

SEQ ID NO: 4152 - DNA, 25 bp, Artificial Sequence
  Description of Artificial Sequence: Synthetic oligonucleotide
ggacgactcagaggtggagtcgacc

SEQ ID NO: 4153 - DNA, 25 bp, Artificial Sequence
  Description of Artificial Sequence: Synthetic oligonucleotide
gacgactcagaggtggagtcgaccg

SEQ ID NO: 4154 - DNA, 25 bp, Artificial Sequence
  Description of Artificial Sequence: Synthetic oligonucleotide
acgactcagaggtggagtcgaccgc

SEQ ID NO: 4155 - DNA, 25 bp, Artificial Sequence
  Description of Artificial Sequence: Synthetic oligonucleotide
cgactcagaggtggagtcgaccgcc

SEQ ID NO: 4156 - DNA, 25 bp, Artificial Sequence
  Description of Artificial Sequence: Synthetic oligonucleotide
gactcagaggtggagtcgaccgcca

SEQ ID NO: 4157 - DNA, 25 bp, Artificial Sequence
  Description of Artificial Sequence: Synthetic oligonucleotide
actcagaggtggagtcgaccgccag

SEQ ID NO: 4158 - DNA, 25 bp, Artificial Sequence
  Description of Artificial Sequence: Synthetic oligonucleotide
ctcagaggtggagtcgaccgccagc

SEQ ID NO: 4159 - DNA, 25 bp, Artificial Sequence
  Description of Artificial Sequence: Synthetic oligonucleotide
tcagaggtggagtcgaccgccagca

SEQ ID NO: 4160 - DNA, 25 bp, Artificial Sequence
  Description of Artificial Sequence: Synthetic oligonucleotide
cagaggtggagtcgaccgccagcat

SEQ ID NO: 4161 - DNA, 25 bp, Artificial Sequence
  Description of Artificial Sequence: Synthetic oligonucleotide
agaggtggagtcgaccgccagcatc

SEQ ID NO: 4162 - DNA, 25 bp, Artificial Sequence
  Description of Artificial Sequence: Synthetic oligonucleotide
gaggtggagtcgaccgccagcatct

SEQ ID NO: 4163 - DNA, 25 bp, Artificial Sequence
  Description of Artificial Sequence: Synthetic oligonucleotide
aggtggagtcgaccgccagcatctt

SEQ ID NO: 4164 - DNA, 25 bp, Artificial Sequence
  Description of Artificial Sequence: Synthetic oligonucleotide
ggtggagtcgaccgccagcatcttg

SEQ ID NO: 4165 - DNA, 25 bp, Artificial Sequence
  Description of Artificial Sequence: Synthetic oligonucleotide
gtggagtcgaccgccagcatcttgg

SEQ ID NO: 4166 - DNA, 25 bp, Artificial Sequence
  Description of Artificial Sequence: Synthetic oligonucleotide
tggagtcgaccgccagcatcttggc

SEQ ID NO: 4167 - DNA, 25 bp, Artificial Sequence
  Description of Artificial Sequence: Synthetic oligonucleotide
ggagtcgaccgccagcatcttggcc

SEQ ID NO: 4168 - DNA, 25 bp, Artificial Sequence
  Description of Artificial Sequence: Synthetic oligonucleotide
gagtcgaccgccagcatcttggcct

SEQ ID NO: 4169 - DNA, 25 bp, Artificial Sequence
  Description of Artificial Sequence: Synthetic oligonucleotide
agtcgaccgccagcatcttggcctc

SEQ ID NO: 4170 - DNA, 25 bp, Artificial Sequence
  Description of Artificial Sequence: Synthetic oligonucleotide
gtcgaccgccagcatcttggcctct

SEQ ID NO: 4171 - DNA, 25 bp, Artificial Sequence
  Description of Artificial Sequence: Synthetic oligonucleotide
tcgaccgccagcatcttggcctctg

SEQ ID NO: 4172 - DNA, 25 bp, Artificial Sequence
  Description of Artificial Sequence: Synthetic oligonucleotide
cgaccgccagcatcttggcctctgt

SEQ ID NO: 4173 - DNA, 25 bp, Artificial Sequence
  Description of Artificial Sequence: Synthetic oligonucleotide
gaccgccagcatcttggcctctgtg

SEQ ID NO: 4174 - DNA, 25 bp, Artificial Sequence
  Description of Artificial Sequence: Synthetic oligonucleotide
accgccagcatcttggcctctgtga

SEQ ID NO: 4175 - DNA, 25 bp, Artificial Sequence
  Description of Artificial Sequence: Synthetic oligonucleotide
ccgccagcatcttggcctctgtgaa

SEQ ID NO: 4176 - DNA, 25 bp, Artificial Sequence
  Description of Artificial Sequence: Synthetic oligonucleotide
cgccagcatcttggcctctgtgaag

SEQ ID NO: 4177 - DNA, 25 bp, Artificial Sequence
  Description of Artificial Sequence: Synthetic oligonucleotide
gccagcatcttggcctctgtgaagg

SEQ ID NO: 4178 - DNA, 25 bp, Artificial Sequence
  Description of Artificial Sequence: Synthetic oligonucleotide
ccagcatcttggcctctgtgaagga

SEQ ID NO: 4179 - DNA, 25 bp, Artificial Sequence
  Description of Artificial Sequence: Synthetic oligonucleotide
cagcatcttggcctctgtgaaggaa

SEQ ID NO: 4180 - DNA, 25 bp, Artificial Sequence
  Description of Artificial Sequence: Synthetic oligonucleotide
agcatcttggcctctgtgaaggaac

SEQ ID NO: 4181 - DNA, 25 bp, Artificial Sequence
  Description of Artificial Sequence: Synthetic oligonucleotide
gcatcttggcctctgtgaaggaaca

SEQ ID NO: 4182 - DNA, 25 bp, Artificial Sequence
  Description of Artificial Sequence: Synthetic oligonucleotide
catcttggcctctgtgaaggaacaa

SEQ ID NO: 4183 - DNA, 25 bp, Artificial Sequence
  Description of Artificial Sequence: Synthetic oligonucleotide
atcttggcctctgtgaaggaacaag

SEQ ID NO: 4184 - DNA, 25 bp, Artificial Sequence
  Description of Artificial Sequence: Synthetic oligonucleotide
tcttggcctctgtgaaggaacaaga

SEQ ID NO: 4185 - DNA, 25 bp, Artificial Sequence
  Description of Artificial Sequence: Synthetic oligonucleotide
cttggcctctgtgaaggaacaagag

SEQ ID NO: 4186 - DNA, 25 bp, Artificial Sequence
  Description of Artificial Sequence: Synthetic oligonucleotide
ttggcctctgtgaaggaacaagagg

SEQ ID NO: 4187 - DNA, 25 bp, Artificial Sequence
  Description of Artificial Sequence: Synthetic oligonucleotide
tggcctctgtgaaggaacaagaggc

SEQ ID NO: 4188 - DNA, 25 bp, Artificial Sequence
  Description of Artificial Sequence: Synthetic oligonucleotide
ggcctctgtgaaggaacaagaggcc

SEQ ID NO: 4189 - DNA, 25 bp, Artificial Sequence
  Description of Artificial Sequence: Synthetic oligonucleotide
gcctctgtgaaggaacaagaggccc

SEQ ID NO: 4190 - DNA, 25 bp, Artificial Sequence
  Description of Artificial Sequence: Synthetic oligonucleotide
cctctgtgaaggaacaagaggccca

SEQ ID NO: 4191 - DNA, 25 bp, Artificial Sequence
  Description of Artificial Sequence: Synthetic oligonucleotide
ctctgtgaaggaacaagaggcccag

SEQ ID NO: 4192 - DNA, 25 bp, Artificial Sequence
  Description of Artificial Sequence: Synthetic oligonucleotide
tctgtgaaggaacaagaggcccagt

SEQ ID NO: 4193 - DNA, 25 bp, Artificial Sequence
  Description of Artificial Sequence: Synthetic oligonucleotide
ctgtgaaggaacaagaggcccagtt

SEQ ID NO: 4194 - DNA, 25 bp, Artificial Sequence
  Description of Artificial Sequence: Synthetic oligonucleotide
tgtgaaggaacaagaggcccagttt

SEQ ID NO: 4195 - DNA, 25 bp, Artificial Sequence
  Description of Artificial Sequence: Synthetic oligonucleotide
gtgaaggaacaagaggcccagtttg

SEQ ID NO: 4196 - DNA, 25 bp, Artificial Sequence
  Description of Artificial Sequence: Synthetic oligonucleotide
tgaaggaacaagaggcccagtttga

SEQ ID NO: 4197 - DNA, 25 bp, Artificial Sequence
  Description of Artificial Sequence: Synthetic oligonucleotide
gaaggaacaagaggcccagtttgag

SEQ ID NO: 4198 - DNA, 25 bp, Artificial Sequence
  Description of Artificial Sequence: Synthetic oligonucleotide
aaggaacaagaggcccagtttgaga

SEQ ID NO: 4199 - DNA, 25 bp, Artificial Sequence
  Description of Artificial Sequence: Synthetic oligonucleotide
aggaacaagaggcccagtttgagaa

SEQ ID NO: 4200 - DNA, 25 bp, Artificial Sequence
  Description of Artificial Sequence: Synthetic oligonucleotide
ggaacaagaggcccagtttgagaag

SEQ ID NO: 4201 - DNA, 25 bp, Artificial Sequence
  Description of Artificial Sequence: Synthetic oligonucleotide
gaacaagaggcccagtttgagaagc

SEQ ID NO: 4202 - DNA, 25 bp, Artificial Sequence
  Description of Artificial Sequence: Synthetic oligonucleotide
aacaagaggcccagtttgagaagct

SEQ ID NO: 4203 - DNA, 25 bp, Artificial Sequence
  Description of Artificial Sequence: Synthetic oligonucleotide
acaagaggcccagtttgagaagctg

SEQ ID NO: 4204 - DNA, 25 bp, Artificial Sequence
  Description of Artificial Sequence: Synthetic oligonucleotide
caagaggcccagtttgagaagctga

SEQ ID NO: 4205 - DNA, 25 bp, Artificial Sequence
  Description of Artificial Sequence: Synthetic oligonucleotide
aagaggcccagtttgagaagctgac

SEQ ID NO: 4206 - DNA, 25 bp, Artificial Sequence
  Description of Artificial Sequence: Synthetic oligonucleotide
agaggcccagtttgagaagctgacc

SEQ ID NO: 4207 - DNA, 25 bp, Artificial Sequence
  Description of Artificial Sequence: Synthetic oligonucleotide
gaggcccagtttgagaagctgaccc

SEQ ID NO: 4208 - DNA, 25 bp, Artificial Sequence
  Description of Artificial Sequence: Synthetic oligonucleotide
aggcccagtttgagaagctgacccg

SEQ ID NO: 4209 - DNA, 25 bp, Artificial Sequence
  Description of Artificial Sequence: Synthetic oligonucleotide
ggcccagtttgagaagctgacccgg

SEQ ID NO: 4210 - DNA, 25 bp, Artificial Sequence
  Description of Artificial Sequence: Synthetic oligonucleotide
gcccagtttgagaagctgacccggg

SEQ ID NO: 4211 - DNA, 25 bp, Artificial Sequence
  Description of Artificial Sequence: Synthetic oligonucleotide
cccagtttgagaagctgacccgggc

SEQ ID NO: 4212 - DNA, 25 bp, Artificial Sequence
  Description of Artificial Sequence: Synthetic oligonucleotide
ccagtttgagaagctgacccgggcg

SEQ ID NO: 4213 - DNA, 25 bp, Artificial Sequence
  Description of Artificial Sequence: Synthetic oligonucleotide
cagtttgagaagctgacccgggcgc

SEQ ID NO: 4214 - DNA, 25 bp, Artificial Sequence
  Description of Artificial Sequence: Synthetic oligonucleotide
agtttgagaagctgacccgggcgct

SEQ ID NO: 4215 - DNA, 25 bp, Artificial Sequence
  Description of Artificial Sequence: Synthetic oligonucleotide
gtttgagaagctgacccgggcgctg

SEQ ID NO: 4216 - DNA, 25 bp, Artificial Sequence
  Description of Artificial Sequence: Synthetic oligonucleotide
tttgagaagctgacccgggcgctgg

SEQ ID NO: 4217 - DNA, 25 bp, Artificial Sequence
  Description of Artificial Sequence: Synthetic oligonucleotide
ttgagaagctgacccgggcgctgga

SEQ ID NO: 4218 - DNA, 25 bp, Artificial Sequence
  Description of Artificial Sequence: Synthetic oligonucleotide
tgagaagctgacccgggcgctggag

SEQ ID NO: 4219 - DNA, 25 bp, Artificial Sequence
  Description of Artificial Sequence: Synthetic oligonucleotide
gagaagctgacccgggcgctggagg

SEQ ID NO: 4220 - DNA, 25 bp, Artificial Sequence
  Description of Artificial Sequence: Synthetic oligonucleotide
agaagctgacccgggcgctggagga

SEQ ID NO: 4221 - DNA, 25 bp, Artificial Sequence
  Description of Artificial Sequence: Synthetic oligonucleotide
gaagctgacccgggcgctggaggag

SEQ ID NO: 4222 - DNA, 25 bp, Artificial Sequence
  Description of Artificial Sequence: Synthetic oligonucleotide
aagctgacccgggcgctggaggagg

SEQ ID NO: 4223 - DNA, 25 bp, Artificial Sequence
  Description of Artificial Sequence: Synthetic oligonucleotide
agctgacccgggcgctggaggagga

SEQ ID NO: 4224 - DNA, 25 bp, Artificial Sequence
  Description of Artificial Sequence: Synthetic oligonucleotide
gctgacccgggcgctggaggaggaa

SEQ ID NO: 4225 - DNA, 25 bp, Artificial Sequence
  Description of Artificial Sequence: Synthetic oligonucleotide
ctgacccgggcgctggaggaggaac

SEQ ID NO: 4226 - DNA, 25 bp, Artificial Sequence
  Description of Artificial Sequence: Synthetic oligonucleotide
tgacccgggcgctggaggaggaacg

SEQ ID NO: 4227 - DNA, 25 bp, Artificial Sequence
  Description of Artificial Sequence: Synthetic oligonucleotide
gacccgggcgctggaggaggaacgg

SEQ ID NO: 4228 - DNA, 25 bp, Artificial Sequence
  Description of Artificial Sequence: Synthetic oligonucleotide
acccgggcgctggaggaggaacggc

SEQ ID NO: 4229 - DNA, 25 bp, Artificial Sequence
  Description of Artificial Sequence: Synthetic oligonucleotide
cccgggcgctggaggaggaacggcg

SEQ ID NO: 4230 - DNA, 25 bp, Artificial Sequence
  Description of Artificial Sequence: Synthetic oligonucleotide
ccgggcgctggaggaggaacggcgc

SEQ ID NO: 4231 - DNA, 25 bp, Artificial Sequence
  Description of Artificial Sequence: Synthetic oligonucleotide
cgggcgctggaggaggaacggcgcc

SEQ ID NO: 4232 - DNA, 25 bp, Artificial Sequence
  Description of Artificial Sequence: Synthetic oligonucleotide
gggcgctggaggaggaacggcgcca

SEQ ID NO: 4233 - DNA, 25 bp, Artificial Sequence
  Description of Artificial Sequence: Synthetic oligonucleotide
ggcgctggaggaggaacggcgccac

SEQ ID NO: 4234 - DNA, 25 bp, Artificial Sequence
  Description of Artificial Sequence: Synthetic oligonucleotide
gcgctggaggaggaacggcgccacg

SEQ ID NO: 4235 - DNA, 25 bp, Artificial Sequence
  Description of Artificial Sequence: Synthetic oligonucleotide
cgctggaggaggaacggcgccacgt

SEQ ID NO: 4236 - DNA, 25 bp, Artificial Sequence
  Description of Artificial Sequence: Synthetic oligonucleotide
gctggaggaggaacggcgccacgtc

SEQ ID NO: 4237 - DNA, 25 bp, Artificial Sequence
  Description of Artificial Sequence: Synthetic oligonucleotide
ctggaggaggaacggcgccacgtct

SEQ ID NO: 4238 - DNA, 25 bp, Artificial Sequence
  Description of Artificial Sequence: Synthetic oligonucleotide
tggaggaggaacggcgccacgtctc

SEQ ID NO: 4239 - DNA, 25 bp, Artificial Sequence
  Description of Artificial Sequence: Synthetic oligonucleotide
ggaggaggaacggcgccacgtctcg

SEQ ID NO: 4240 - DNA, 25 bp, Artificial Sequence
  Description of Artificial Sequence: Synthetic oligonucleotide
gaggaggaacggcgccacgtctcgg

SEQ ID NO: 4241 - DNA, 25 bp, Artificial Sequence
  Description of Artificial Sequence: Synthetic oligonucleotide
aggaggaacggcgccacgtctcggc

SEQ ID NO: 4242 - DNA, 25 bp, Artificial Sequence
  Description of Artificial Sequence: Synthetic oligonucleotide
ggaggaacggcgccacgtctcggcg

SEQ ID NO: 4243 - DNA, 25 bp, Artificial Sequence
  Description of Artificial Sequence: Synthetic oligonucleotide
gaggaacggcgccacgtctcggcgc

SEQ ID NO: 4244 - DNA, 25 bp, Artificial Sequence
  Description of Artificial Sequence: Synthetic oligonucleotide
aggaacggcgccacgtctcggcgca

SEQ ID NO: 4245 - DNA, 25 bp, Artificial Sequence
  Description of Artificial Sequence: Synthetic oligonucleotide
ggaacggcgccacgtctcggcgcag

SEQ ID NO: 4246 - DNA, 25 bp, Artificial Sequence
  Description of Artificial Sequence: Synthetic oligonucleotide
gaacggcgccacgtctcggcgcagc

SEQ ID NO: 4247 - DNA, 25 bp, Artificial Sequence
  Description of Artificial Sequence: Synthetic oligonucleotide
aacggcgccacgtctcggcgcagct

SEQ ID NO: 4248 - DNA, 25 bp, Artificial Sequence
  Description of Artificial Sequence: Synthetic oligonucleotide
acggcgccacgtctcggcgcagctg

SEQ ID NO: 4249 - DNA, 25 bp, Artificial Sequence
  Description of Artificial Sequence: Synthetic oligonucleotide
cggcgccacgtctcggcgcagctgg

SEQ ID NO: 4250 - DNA, 25 bp, Artificial Sequence
  Description of Artificial Sequence: Synthetic oligonucleotide
ggcgccacgtctcggcgcagctgga

SEQ ID NO: 4251 - DNA, 25 bp, Artificial Sequence
  Description of Artificial Sequence: Synthetic oligonucleotide
gcgccacgtctcggcgcagctggaa

SEQ ID NO: 4252 - DNA, 25 bp, Artificial Sequence
  Description of Artificial Sequence: Synthetic oligonucleotide
cgccacgtctcggcgcagctggaac

SEQ ID NO: 4253 - DNA, 25 bp, Artificial Sequence
  Description of Artificial Sequence: Synthetic oligonucleotide
gccacgtctcggcgcagctggaacg

SEQ ID NO: 4254 - DNA, 25 bp, Artificial Sequence
  Description of Artificial Sequence: Synthetic oligonucleotide
ccacgtctcggcgcagctggaacgc

SEQ ID NO: 4255 - DNA, 25 bp, Artificial Sequence
  Description of Artificial Sequence: Synthetic oligonucleotide
cacgtctcggcgcagctggaacgcg

SEQ ID NO: 4256 - DNA, 25 bp, Artificial Sequence
  Description of Artificial Sequence: Synthetic oligonucleotide
acgtctcggcgcagctggaacgcgt

SEQ ID NO: 4257 - DNA, 25 bp, Artificial Sequence
  Description of Artificial Sequence: Synthetic oligonucleotide
cgtctcggcgcagctggaacgcgtc

SEQ ID NO: 4258 - DNA, 25 bp, Artificial Sequence
  Description of Artificial Sequence: Synthetic oligonucleotide
gtctcggcgcagctggaacgcgtcc

SEQ ID NO: 4259 - DNA, 25 bp, Artificial Sequence
  Description of Artificial Sequence: Synthetic oligonucleotide
tctcggcgcagctggaacgcgtccg

SEQ ID NO: 4260 - DNA, 25 bp, Artificial Sequence
  Description of Artificial Sequence: Synthetic oligonucleotide
ctcggcgcagctggaacgcgtccgg

SEQ ID NO: 4261 - DNA, 25 bp, Artificial Sequence
  Description of Artificial Sequence: Synthetic oligonucleotide
tcggcgcagctggaacgcgtccggg

SEQ ID NO: 4262 - DNA, 25 bp, Artificial Sequence
  Description of Artificial Sequence: Synthetic oligonucleotide
cggcgcagctggaacgcgtccgggt

SEQ ID NO: 4263 - DNA, 25 bp, Artificial Sequence
  Description of Artificial Sequence: Synthetic oligonucleotide
ggcgcagctggaacgcgtccgggtc

SEQ ID NO: 4264 - DNA, 25 bp, Artificial Sequence
  Description of Artificial Sequence: Synthetic oligonucleotide
gcgcagctggaacgcgtccgggtct

SEQ ID NO: 4265 - DNA, 25 bp, Artificial Sequence
  Description of Artificial Sequence: Synthetic oligonucleotide
cgcagctggaacgcgtccgggtctc

SEQ ID NO: 4266 - DNA, 25 bp, Artificial Sequence
  Description of Artificial Sequence: Synthetic oligonucleotide
gcagctggaacgcgtccgggtctca

SEQ ID NO: 4267 - DNA, 25 bp, Artificial Sequence
  Description of Artificial Sequence: Synthetic oligonucleotide
cagctggaacgcgtccgggtctcac

SEQ ID NO: 4268 - DNA, 25 bp, Artificial Sequence
  Description of Artificial Sequence: Synthetic oligonucleotide
agctggaacgcgtccgggtctcacc

SEQ ID NO: 4269 - DNA, 25 bp, Artificial Sequence
  Description of Artificial Sequence: Synthetic oligonucleotide
gctggaacgcgtccgggtctcacca

SEQ ID NO: 4270 - DNA, 25 bp, Artificial Sequence
  Description of Artificial Sequence: Synthetic oligonucleotide
ctggaacgcgtccgggtctcaccac

SEQ ID NO: 4271 - DNA, 25 bp, Artificial Sequence
  Description of Artificial Sequence: Synthetic oligonucleotide
tggaacgcgtccgggtctcaccaca

SEQ ID NO: 4272 - DNA, 25 bp, Artificial Sequence
  Description of Artificial Sequence: Synthetic oligonucleotide
ggaacgcgtccgggtctcaccacaa

SEQ ID NO: 4273 - DNA, 25 bp, Artificial Sequence
  Description of Artificial Sequence: Synthetic oligonucleotide
gaacgcgtccgggtctcaccacaag

SEQ ID NO: 4274 - DNA, 25 bp, Artificial Sequence
  Description of Artificial Sequence: Synthetic oligonucleotide
aacgcgtccgggtctcaccacaaga

SEQ ID NO: 4275 - DNA, 25 bp, Artificial Sequence
  Description of Artificial Sequence: Synthetic oligonucleotide
acgcgtccgggtctcaccacaagat

SEQ ID NO: 4276 - DNA, 25 bp, Artificial Sequence
  Description of Artificial Sequence: Synthetic oligonucleotide
cgcgtccgggtctcaccacaagatg

SEQ ID NO: 4277 - DNA, 25 bp, Artificial Sequence
  Description of Artificial Sequence: Synthetic oligonucleotide
gcgtccgggtctcaccacaagatgc

SEQ ID NO: 4278 - DNA, 25 bp, Artificial Sequence
  Description of Artificial Sequence: Synthetic oligonucleotide
cgtccgggtctcaccacaagatgcc

SEQ ID NO: 4279 - DNA, 25 bp, Artificial Sequence
  Description of Artificial Sequence: Synthetic oligonucleotide
gtccgggtctcaccacaagatgcca

SEQ ID NO: 4280 - DNA, 25 bp, Artificial Sequence
  Description of Artificial Sequence: Synthetic oligonucleotide
tccgggtctcaccacaagatgccaa

SEQ ID NO: 4281 - DNA, 25 bp, Artificial Sequence
  Description of Artificial Sequence: Synthetic oligonucleotide
ccgggtctcaccacaagatgccaac

SEQ ID NO: 4282 - DNA, 25 bp, Artificial Sequence
  Description of Artificial Sequence: Synthetic oligonucleotide
cgggtctcaccacaagatgccaacc

SEQ ID NO: 4283 - DNA, 25 bp, Artificial Sequence
  Description of Artificial Sequence: Synthetic oligonucleotide
gggtctcaccacaagatgccaaccc

SEQ ID NO: 4284 - DNA, 25 bp, Artificial Sequence
  Description of Artificial Sequence: Synthetic oligonucleotide
ggtctcaccacaagatgccaaccca

SEQ ID NO: 4285 - DNA, 25 bp, Artificial Sequence
  Description of Artificial Sequence: Synthetic oligonucleotide
gtctcaccacaagatgccaacccac

SEQ ID NO: 4286 - DNA, 25 bp, Artificial Sequence
  Description of Artificial Sequence: Synthetic oligonucleotide
tctcaccacaagatgccaacccact

SEQ ID NO: 4287 - DNA, 25 bp, Artificial Sequence
  Description of Artificial Sequence: Synthetic oligonucleotide
ctcaccacaagatgccaacccactc

SEQ ID NO: 4288 - DNA, 25 bp, Artificial Sequence
  Description of Artificial Sequence: Synthetic oligonucleotide
tcaccacaagatgccaacccactca

SEQ ID NO: 4289 - DNA, 25 bp, Artificial Sequence
  Description of Artificial Sequence: Synthetic oligonucleotide
caccacaagatgccaacccactcat

SEQ ID NO: 4290 - DNA, 25 bp, Artificial Sequence
  Description of Artificial Sequence: Synthetic oligonucleotide
accacaagatgccaacccactcatg

SEQ ID NO: 4291 - DNA, 25 bp, Artificial Sequence
  Description of Artificial Sequence: Synthetic oligonucleotide
ccacaagatgccaacccactcatgg

SEQ ID NO: 4292 - DNA, 25 bp, Artificial Sequence
  Description of Artificial Sequence: Synthetic oligonucleotide
cacaagatgccaacccactcatggc

SEQ ID NO: 4293 - DNA, 25 bp, Artificial Sequence
  Description of Artificial Sequence: Synthetic oligonucleotide
acaagatgccaacccactcatggcc

SEQ ID NO: 4294 - DNA, 25 bp, Artificial Sequence
  Description of Artificial Sequence: Synthetic oligonucleotide
caagatgccaacccactcatggcca

SEQ ID NO: 4295 - DNA, 25 bp, Artificial Sequence
  Description of Artificial Sequence: Synthetic oligonucleotide
aagatgccaacccactcatggccaa

SEQ ID NO: 4296 - DNA, 25 bp, Artificial Sequence
  Description of Artificial Sequence: Synthetic oligonucleotide
agatgccaacccactcatggccaac

SEQ ID NO: 4297 - DNA, 25 bp, Artificial Sequence
  Description of Artificial Sequence: Synthetic oligonucleotide
gatgccaacccactcatggccaacg

SEQ ID NO: 4298 - DNA, 25 bp, Artificial Sequence
  Description of Artificial Sequence: Synthetic oligonucleotide
atgccaacccactcatggccaacgg

SEQ ID NO: 4299 - DNA, 25 bp, Artificial Sequence
  Description of Artificial Sequence: Synthetic oligonucleotide
tgccaacccactcatggccaacggc

SEQ ID NO: 4300 - DNA, 25 bp, Artificial Sequence
  Description of Artificial Sequence: Synthetic oligonucleotide
gccaacccactcatggccaacggca

SEQ ID NO: 4301 - DNA, 25 bp, Artificial Sequence
  Description of Artificial Sequence: Synthetic oligonucleotide
ccaacccactcatggccaacggcac

SEQ ID NO: 4302 - DNA, 25 bp, Artificial Sequence
  Description of Artificial Sequence: Synthetic oligonucleotide
caacccactcatggccaacggcaca

SEQ ID NO: 4303 - DNA, 25 bp, Artificial Sequence
  Description of Artificial Sequence: Synthetic oligonucleotide
aacccactcatggccaacggcacac

SEQ ID NO: 4304 - DNA, 25 bp, Artificial Sequence
  Description of Artificial Sequence: Synthetic oligonucleotide
acccactcatggccaacggcacact

SEQ ID NO: 4305 - DNA, 25 bp, Artificial Sequence
  Description of Artificial Sequence: Synthetic oligonucleotide
cccactcatggccaacggcacactc

SEQ ID NO: 4306 - DNA, 25 bp, Artificial Sequence
  Description of Artificial Sequence: Synthetic oligonucleotide
ccactcatggccaacggcacactca

SEQ ID NO: 4307 - DNA, 25 bp, Artificial Sequence
  Description of Artificial Sequence: Synthetic oligonucleotide
cactcatggccaacggcacactcac

SEQ ID NO: 4308 - DNA, 25 bp, Artificial Sequence
  Description of Artificial Sequence: Synthetic oligonucleotide
actcatggccaacggcacactcacc

SEQ ID NO: 4309 - DNA, 25 bp, Artificial Sequence
  Description of Artificial Sequence: Synthetic oligonucleotide
ctcatggccaacggcacactcaccc

SEQ ID NO: 4310 - DNA, 25 bp, Artificial Sequence
  Description of Artificial Sequence: Synthetic oligonucleotide
tcatggccaacggcacactcacccg

SEQ ID NO: 4311 - DNA, 25 bp, Artificial Sequence
  Description of Artificial Sequence: Synthetic oligonucleotide
catggccaacggcacactcacccgc

SEQ ID NO: 4312 - DNA, 25 bp, Artificial Sequence
  Description of Artificial Sequence: Synthetic oligonucleotide
atggccaacggcacactcacccgcc

SEQ ID NO: 4313 - DNA, 25 bp, Artificial Sequence
  Description of Artificial Sequence: Synthetic oligonucleotide
tggccaacggcacactcacccgccg

SEQ ID NO: 4314 - DNA, 25 bp, Artificial Sequence
  Description of Artificial Sequence: Synthetic oligonucleotide
ggccaacggcacactcacccgccgg

SEQ ID NO: 4315 - DNA, 25 bp, Artificial Sequence
  Description of Artificial Sequence: Synthetic oligonucleotide
gccaacggcacactcacccgccggc

SEQ ID NO: 4316 - DNA, 25 bp, Artificial Sequence
  Description of Artificial Sequence: Synthetic oligonucleotide
ccaacggcacactcacccgccggca

SEQ ID NO: 4317 - DNA, 25 bp, Artificial Sequence
  Description of Artificial Sequence: Synthetic oligonucleotide
caacggcacactcacccgccggcat

SEQ ID NO: 4318 - DNA, 25 bp, Artificial Sequence
  Description of Artificial Sequence: Synthetic oligonucleotide
aacggcacactcacccgccggcatc

SEQ ID NO: 4319 - DNA, 25 bp, Artificial Sequence
  Description of Artificial Sequence: Synthetic oligonucleotide
acggcacactcacccgccggcatca

SEQ ID NO: 4320 - DNA, 25 bp, Artificial Sequence
  Description of Artificial Sequence: Synthetic oligonucleotide
cggcacactcacccgccggcatcag

SEQ ID NO: 4321 - DNA, 25 bp, Artificial Sequence
  Description of Artificial Sequence: Synthetic oligonucleotide
ggcacactcacccgccggcatcagg

SEQ ID NO: 4322 - DNA, 25 bp, Artificial Sequence
  Description of Artificial Sequence: Synthetic oligonucleotide
gcacactcacccgccggcatcaggt

SEQ ID NO: 4323 - DNA, 25 bp, Artificial Sequence
  Description of Artificial Sequence: Synthetic oligonucleotide
cacactcacccgccggcatcaggta

SEQ ID NO: 4324 - DNA, 25 bp, Artificial Sequence
  Description of Artificial Sequence: Synthetic oligonucleotide
acactcacccgccggcatcaggtaa

SEQ ID NO: 4325 - DNA, 25 bp, Artificial Sequence
  Description of Artificial Sequence: Synthetic oligonucleotide
cactcacccgccggcatcaggtaac

SEQ ID NO: 4326 - DNA, 25 bp, Artificial Sequence
  Description of Artificial Sequence: Synthetic oligonucleotide
actcacccgccggcatcaggtaacc

SEQ ID NO: 4327 - DNA, 25 bp, Artificial Sequence
  Description of Artificial Sequence: Synthetic oligonucleotide
ctcacccgccggcatcaggtaaccc

SEQ ID NO: 4328 - DNA, 25 bp, Artificial Sequence
  Description of Artificial Sequence: Synthetic oligonucleotide
tcacccgccggcatcaggtaacccc

SEQ ID NO: 4329 - DNA, 25 bp, Artificial Sequence
  Description of Artificial Sequence: Synthetic oligonucleotide
cacccgccggcatcaggtaacccct

SEQ ID NO: 4330 - DNA, 25 bp, Artificial Sequence
  Description of Artificial Sequence: Synthetic oligonucleotide
acccgccggcatcaggtaacccctc

SEQ ID NO: 4331 - DNA, 25 bp, Artificial Sequence
  Description of Artificial Sequence: Synthetic oligonucleotide
cccgccggcatcaggtaacccctct

SEQ ID NO: 4332 - DNA, 25 bp, Artificial Sequence
  Description of Artificial Sequence: Synthetic oligonucleotide
ccgccggcatcaggtaacccctctc

SEQ ID NO: 4333 - DNA, 25 bp, Artificial Sequence
  Description of Artificial Sequence: Synthetic oligonucleotide
cgccggcatcaggtaacccctctct

SEQ ID NO: 4334 - DNA, 25 bp, Artificial Sequence
  Description of Artificial Sequence: Synthetic oligonucleotide
gccggcatcaggtaacccctctctc

SEQ ID NO: 4335 - DNA, 25 bp, Artificial Sequence
  Description of Artificial Sequence: Synthetic oligonucleotide
ccggcatcaggtaacccctctctcc

SEQ ID NO: 4336 - DNA, 25 bp, Artificial Sequence
  Description of Artificial Sequence: Synthetic oligonucleotide
cggcatcaggtaacccctctctcca

SEQ ID NO: 4337 - DNA, 25 bp, Artificial Sequence
  Description of Artificial Sequence: Synthetic oligonucleotide
ggcatcaggtaacccctctctccat

SEQ ID NO: 4338 - DNA, 25 bp, Artificial Sequence
  Description of Artificial Sequence: Synthetic oligonucleotide
gcatcaggtaacccctctctccatc

SEQ ID NO: 4339 - DNA, 25 bp, Artificial Sequence
  Description of Artificial Sequence: Synthetic oligonucleotide
catcaggtaacccctctctccatca

SEQ ID NO: 4340 - DNA, 25 bp, Artificial Sequence
  Description of Artificial Sequence: Synthetic oligonucleotide
atcaggtaacccctctctccatcag

SEQ ID NO: 4341 - DNA, 25 bp, Artificial Sequence
  Description of Artificial Sequence: Synthetic oligonucleotide
tcaggtaacccctctctccatcaga

SEQ ID NO: 4342 - DNA, 25 bp, Artificial Sequence
  Description of Artificial Sequence: Synthetic oligonucleotide
caggtaacccctctctccatcagac

SEQ ID NO: 4343 - DNA, 25 bp, Artificial Sequence
  Description of Artificial Sequence: Synthetic oligonucleotide
aggtaacccctctctccatcagacg

SEQ ID NO: 4344 - DNA, 25 bp, Artificial Sequence
  Description of Artificial Sequence: Synthetic oligonucleotide
ggtaacccctctctccatcagacgt

SEQ ID NO: 4345 - DNA, 25 bp, Artificial Sequence
  Description of Artificial Sequence: Synthetic oligonucleotide
gtaacccctctctccatcagacgtg

SEQ ID NO: 4346 - DNA, 25 bp, Artificial Sequence
  Description of Artificial Sequence: Synthetic oligonucleotide
taacccctctctccatcagacgtgc

SEQ ID NO: 4347 - DNA, 25 bp, Artificial Sequence
  Description of Artificial Sequence: Synthetic oligonucleotide
aacccctctctccatcagacgtgca

SEQ ID NO: 4348 - DNA, 25 bp, Artificial Sequence
  Description of Artificial Sequence: Synthetic oligonucleotide
acccctctctccatcagacgtgcag

SEQ ID NO: 4349 - DNA, 25 bp, Artificial Sequence
  Description of Artificial Sequence: Synthetic oligonucleotide
cccctctctccatcagacgtgcagg

SEQ ID NO: 4350 - DNA, 25 bp, Artificial Sequence
  Description of Artificial Sequence: Synthetic oligonucleotide
ccctctctccatcagacgtgcaggt

SEQ ID NO: 4351 - DNA, 25 bp, Artificial Sequence
  Description of Artificial Sequence: Synthetic oligonucleotide
cctctctccatcagacgtgcaggta

SEQ ID NO: 4352 - DNA, 25 bp, Artificial Sequence
  Description of Artificial Sequence: Synthetic oligonucleotide
ctctctccatcagacgtgcaggtag

SEQ ID NO: 4353 - DNA, 25 bp, Artificial Sequence
  Description of Artificial Sequence: Synthetic oligonucleotide
tctctccatcagacgtgcaggtagg

SEQ ID NO: 4354 - DNA, 25 bp, Artificial Sequence
  Description of Artificial Sequence: Synthetic oligonucleotide
ctctccatcagacgtgcaggtagga

SEQ ID NO: 4355 - DNA, 25 bp, Artificial Sequence
  Description of Artificial Sequence: Synthetic oligonucleotide
tctccatcagacgtgcaggtaggac

SEQ ID NO: 4356 - DNA, 25 bp, Artificial Sequence
  Description of Artificial Sequence: Synthetic oligonucleotide
ctccatcagacgtgcaggtaggact

SEQ ID NO: 4357 - DNA, 25 bp, Artificial Sequence
  Description of Artificial Sequence: Synthetic oligonucleotide
tccatcagacgtgcaggtaggactt

SEQ ID NO: 4358 - DNA, 25 bp, Artificial Sequence
  Description of Artificial Sequence: Synthetic oligonucleotide
ccatcagacgtgcaggtaggacttt

SEQ ID NO: 4359 - DNA, 25 bp, Artificial Sequence
  Description of Artificial Sequence: Synthetic oligonucleotide
catcagacgtgcaggtaggactttg

SEQ ID NO: 4360 - DNA, 25 bp, Artificial Sequence
  Description of Artificial Sequence: Synthetic oligonucleotide
atcagacgtgcaggtaggactttgg

SEQ ID NO: 4361 - DNA, 25 bp, Artificial Sequence
  Description of Artificial Sequence: Synthetic oligonucleotide
tcagacgtgcaggtaggactttggc

SEQ ID NO: 4362 - DNA, 25 bp, Artificial Sequence
  Description of Artificial Sequence: Synthetic oligonucleotide
cagacgtgcaggtaggactttggca

SEQ ID NO: 4363 - DNA, 25 bp, Artificial Sequence
  Description of Artificial Sequence: Synthetic oligonucleotide
agacgtgcaggtaggactttggcat

SEQ ID NO: 4364 - DNA, 25 bp, Artificial Sequence
  Description of Artificial Sequence: Synthetic oligonucleotide
gacgtgcaggtaggactttggcatg

SEQ ID NO: 4365 - DNA, 25 bp, Artificial Sequence
  Description of Artificial Sequence: Synthetic oligonucleotide
acgtgcaggtaggactttggcatgg

SEQ ID NO: 4366 - DNA, 25 bp, Artificial Sequence
  Description of Artificial Sequence: Synthetic oligonucleotide
cgtgcaggtaggactttggcatggt

SEQ ID NO: 4367 - DNA, 25 bp, Artificial Sequence
  Description of Artificial Sequence: Synthetic oligonucleotide
gtgcaggtaggactttggcatggtc

SEQ ID NO: 4368 - DNA, 25 bp, Artificial Sequence
  Description of Artificial Sequence: Synthetic oligonucleotide
tgcaggtaggactttggcatggtca

SEQ ID NO: 4369 - DNA, 25 bp, Artificial Sequence
  Description of Artificial Sequence: Synthetic oligonucleotide
gcaggtaggactttggcatggtcac

SEQ ID NO: 4370 - DNA, 25 bp, Artificial Sequence
  Description of Artificial Sequence: Synthetic oligonucleotide
caggtaggactttggcatggtcaca

SEQ ID NO: 4371 - DNA, 25 bp, Artificial Sequence
  Description of Artificial Sequence: Synthetic oligonucleotide
ggagagcgccagtggccttgtgtga

SEQ ID NO: 4372 - DNA, 25 bp, Artificial Sequence
  Description of Artificial Sequence: Synthetic oligonucleotide
gagagcgccagtggccttgtgtgac

SEQ ID NO: 4373 - DNA, 25 bp, Artificial Sequence
  Description of Artificial Sequence: Synthetic oligonucleotide
agagcgccagtggccttgtgtgacc

SEQ ID NO: 4374 - DNA, 25 bp, Artificial Sequence
  Description of Artificial Sequence: Synthetic oligonucleotide
gagcgccagtggccttgtgtgacct

SEQ ID NO: 4375 - DNA, 25 bp, Artificial Sequence
  Description of Artificial Sequence: Synthetic oligonucleotide
agcgccagtggccttgtgtgacctt

SEQ ID NO: 4376 - DNA, 25 bp, Artificial Sequence
  Description of Artificial Sequence: Synthetic oligonucleotide
gcgccagtggccttgtgtgaccttt

SEQ ID NO: 4377 - DNA, 25 bp, Artificial Sequence
  Description of Artificial Sequence: Synthetic oligonucleotide
cgccagtggccttgtgtgacctttg

SEQ ID NO: 4378 - DNA, 25 bp, Artificial Sequence
  Description of Artificial Sequence: Synthetic oligonucleotide
gccagtggccttgtgtgacctttgc

SEQ ID NO: 4379 - DNA, 25 bp, Artificial Sequence
  Description of Artificial Sequence: Synthetic oligonucleotide
ccagtggccttgtgtgacctttgcc

SEQ ID NO: 4380 - DNA, 25 bp, Artificial Sequence
  Description of Artificial Sequence: Synthetic oligonucleotide
cagtggccttgtgtgacctttgccc

SEQ ID NO: 4381 - DNA, 25 bp, Artificial Sequence
  Description of Artificial Sequence: Synthetic oligonucleotide
agtggccttgtgtgacctttgccct

SEQ ID NO: 4382 - DNA, 25 bp, Artificial Sequence
  Description of Artificial Sequence: Synthetic oligonucleotide
gtggccttgtgtgacctttgccctt

SEQ ID NO: 4383 - DNA, 25 bp, Artificial Sequence
  Description of Artificial Sequence: Synthetic oligonucleotide
tggccttgtgtgacctttgcccttt

SEQ ID NO: 4384 - DNA, 25 bp, Artificial Sequence
  Description of Artificial Sequence: Synthetic oligonucleotide
ggccttgtgtgacctttgccctttg

SEQ ID NO: 4385 - DNA, 25 bp, Artificial Sequence
  Description of Artificial Sequence: Synthetic oligonucleotide
gccttgtgtgacctttgccctttgt

SEQ ID NO: 4386 - DNA, 25 bp, Artificial Sequence
  Description of Artificial Sequence: Synthetic oligonucleotide
ccttgtgtgacctttgccctttgtc

SEQ ID NO: 4387 - DNA, 25 bp, Artificial Sequence
  Description of Artificial Sequence: Synthetic oligonucleotide
cttgtgtgacctttgccctttgtct

SEQ ID NO: 4388 - DNA, 25 bp, Artificial Sequence
  Description of Artificial Sequence: Synthetic oligonucleotide
ttgtgtgacctttgccctttgtctc

SEQ ID NO: 4389 - DNA, 25 bp, Artificial Sequence
  Description of Artificial Sequence: Synthetic oligonucleotide
tgtgtgacctttgccctttgtctct

SEQ ID NO: 4390 - DNA, 25 bp, Artificial Sequence
  Description of Artificial Sequence: Synthetic oligonucleotide
gtgtgacctttgccctttgtctctg

SEQ ID NO: 4391 - DNA, 25 bp, Artificial Sequence
  Description of Artificial Sequence: Synthetic oligonucleotide
tgtgacctttgccctttgtctctgt

SEQ ID NO: 4392 - DNA, 25 bp, Artificial Sequence
  Description of Artificial Sequence: Synthetic oligonucleotide
gtgacctttgccctttgtctctgtc

SEQ ID NO: 4393 - DNA, 25 bp, Artificial Sequence
  Description of Artificial Sequence: Synthetic oligonucleotide
tgacctttgccctttgtctctgtct

SEQ ID NO: 4394 - DNA, 25 bp, Artificial Sequence
  Description of Artificial Sequence: Synthetic oligonucleotide
gacctttgccctttgtctctgtctt

SEQ ID NO: 4395 - DNA, 25 bp, Artificial Sequence
  Description of Artificial Sequence: Synthetic oligonucleotide
acctttgccctttgtctctgtcttt

SEQ ID NO: 4396 - DNA, 25 bp, Artificial Sequence
  Description of Artificial Sequence: Synthetic oligonucleotide
cctttgccctttgtctctgtcttta

SEQ ID NO: 4397 - DNA, 25 bp, Artificial Sequence
  Description of Artificial Sequence: Synthetic oligonucleotide
ctttgccctttgtctctgtctttag

SEQ ID NO: 4398 - DNA, 25 bp, Artificial Sequence
  Description of Artificial Sequence: Synthetic oligonucleotide
tttgccctttgtctctgtctttagg

SEQ ID NO: 4399 - DNA, 25 bp, Artificial Sequence
  Description of Artificial Sequence: Synthetic oligonucleotide
ttgccctttgtctctgtctttagga

SEQ ID NO: 4400 - DNA, 25 bp, Artificial Sequence
  Description of Artificial Sequence: Synthetic oligonucleotide
tgccctttgtctctgtctttaggag

SEQ ID NO: 4401 - DNA, 25 bp, Artificial Sequence
  Description of Artificial Sequence: Synthetic oligonucleotide
gccctttgtctctgtctttaggagg

SEQ ID NO: 4402 - DNA, 25 bp, Artificial Sequence
  Description of Artificial Sequence: Synthetic oligonucleotide
ccctttgtctctgtctttaggaggc

SEQ ID NO: 4403 - DNA, 25 bp, Artificial Sequence
  Description of Artificial Sequence: Synthetic oligonucleotide
cctttgtctctgtctttaggaggca

SEQ ID NO: 4404 - DNA, 25 bp, Artificial Sequence
  Description of Artificial Sequence: Synthetic oligonucleotide
ctttgtctctgtctttaggaggcac

SEQ ID NO: 4405 - DNA, 25 bp, Artificial Sequence
  Description of Artificial Sequence: Synthetic oligonucleotide
tttgtctctgtctttaggaggcacg

SEQ ID NO: 4406 - DNA, 25 bp, Artificial Sequence
  Description of Artificial Sequence: Synthetic oligonucleotide
ttgtctctgtctttaggaggcacgc

SEQ ID NO: 4407 - DNA, 25 bp, Artificial Sequence
  Description of Artificial Sequence: Synthetic oligonucleotide
tgtctctgtctttaggaggcacgcg

SEQ ID NO: 4408 - DNA, 25 bp, Artificial Sequence
  Description of Artificial Sequence: Synthetic oligonucleotide
gtctctgtctttaggaggcacgcgg

SEQ ID NO: 4409 - DNA, 25 bp, Artificial Sequence
  Description of Artificial Sequence: Synthetic oligonucleotide
tctctgtctttaggaggcacgcgga

SEQ ID NO: 4410 - DNA, 25 bp, Artificial Sequence
  Description of Artificial Sequence: Synthetic oligonucleotide
ctctgtctttaggaggcacgcggac

SEQ ID NO: 4411 - DNA, 25 bp, Artificial Sequence
  Description of Artificial Sequence: Synthetic oligonucleotide
tctgtctttaggaggcacgcggacc

SEQ ID NO: 4412 - DNA, 25 bp, Artificial Sequence
  Description of Artificial Sequence: Synthetic oligonucleotide
ctgtctttaggaggcacgcggacct

SEQ ID NO: 4413 - DNA, 25 bp, Artificial Sequence
  Description of Artificial Sequence: Synthetic oligonucleotide
tgtctttaggaggcacgcggacctc

SEQ ID NO: 4414 - DNA, 25 bp, Artificial Sequence
  Description of Artificial Sequence: Synthetic oligonucleotide
gtctttaggaggcacgcggacctcc

SEQ ID NO: 4415 - DNA, 25 bp, Artificial Sequence
  Description of Artificial Sequence: Synthetic oligonucleotide
tctttaggaggcacgcggacctcca

SEQ ID NO: 4416 - DNA, 25 bp, Artificial Sequence
  Description of Artificial Sequence: Synthetic oligonucleotide
ctttaggaggcacgcggacctccag

SEQ ID NO: 4417 - DNA, 25 bp, Artificial Sequence
  Description of Artificial Sequence: Synthetic oligonucleotide
tttaggaggcacgcggacctccagt

SEQ ID NO: 4418 - DNA, 25 bp, Artificial Sequence
  Description of Artificial Sequence: Synthetic oligonucleotide
ttaggaggcacgcggacctccagtg

SEQ ID NO: 4419 - DNA, 25 bp, Artificial Sequence
  Description of Artificial Sequence: Synthetic oligonucleotide
taggaggcacgcggacctccagtgg

SEQ ID NO: 4420 - DNA, 25 bp, Artificial Sequence
  Description of Artificial Sequence: Synthetic oligonucleotide
aggaggcacgcggacctccagtggc

SEQ ID NO: 4421 - DNA, 25 bp, Artificial Sequence
  Description of Artificial Sequence: Synthetic oligonucleotide
ggaggcacgcggacctccagtggcc

SEQ ID NO: 4422 - DNA, 25 bp, Artificial Sequence
  Description of Artificial Sequence: Synthetic oligonucleotide
gaggcacgcggacctccagtggccg

SEQ ID NO: 4423 - DNA, 25 bp, Artificial Sequence
  Description of Artificial Sequence: Synthetic oligonucleotide
aggcacgcggacctccagtggccgg

SEQ ID NO: 4424 - DNA, 25 bp, Artificial Sequence
  Description of Artificial Sequence: Synthetic oligonucleotide
ggcacgcggacctccagtggccggc

SEQ ID NO: 4425 - DNA, 25 bp, Artificial Sequence
  Description of Artificial Sequence: Synthetic oligonucleotide
gcacgcggacctccagtggccggct

SEQ ID NO: 4426 - DNA, 25 bp, Artificial Sequence
  Description of Artificial Sequence: Synthetic oligonucleotide
cacgcggacctccagtggccggctc

SEQ ID NO: 4427 - DNA, 25 bp, Artificial Sequence
  Description of Artificial Sequence: Synthetic oligonucleotide
acgcggacctccagtggccggctcc

SEQ ID NO: 4428 - DNA, 25 bp, Artificial Sequence
  Description of Artificial Sequence: Synthetic oligonucleotide
cgcggacctccagtggccggctccg

SEQ ID NO: 4429 - DNA, 25 bp, Artificial Sequence
  Description of Artificial Sequence: Synthetic oligonucleotide
gcggacctccagtggccggctccgg

SEQ ID NO: 4430 - DNA, 25 bp, Artificial Sequence
  Description of Artificial Sequence: Synthetic oligonucleotide
cggacctccagtggccggctccgga

SEQ ID NO: 4431 - DNA, 25 bp, Artificial Sequence
  Description of Artificial Sequence: Synthetic oligonucleotide
ggacctccagtggccggctccggag

SEQ ID NO: 4432 - DNA, 25 bp, Artificial Sequence
  Description of Artificial Sequence: Synthetic oligonucleotide
gacctccagtggccggctccggagg

SEQ ID NO: 4433 - DNA, 25 bp, Artificial Sequence
  Description of Artificial Sequence: Synthetic oligonucleotide
acctccagtggccggctccggaggc

SEQ ID NO: 4434 - DNA, 25 bp, Artificial Sequence
  Description of Artificial Sequence: Synthetic oligonucleotide
cctccagtggccggctccggaggct

SEQ ID NO: 4435 - DNA, 25 bp, Artificial Sequence
  Description of Artificial Sequence: Synthetic oligonucleotide
ctccagtggccggctccggaggctt

SEQ ID NO: 4436 - DNA, 25 bp, Artificial Sequence
  Description of Artificial Sequence: Synthetic oligonucleotide
tccagtggccggctccggaggcttg

SEQ ID NO: 4437 - DNA, 25 bp, Artificial Sequence
  Description of Artificial Sequence: Synthetic oligonucleotide
ccagtggccggctccggaggcttgg

SEQ ID NO: 4438 - DNA, 25 bp, Artificial Sequence
  Description of Artificial Sequence: Synthetic oligonucleotide
cagtggccggctccggaggcttggt

SEQ ID NO: 4439 - DNA, 25 bp, Artificial Sequence
  Description of Artificial Sequence: Synthetic oligonucleotide
agtggccggctccggaggcttggtg

SEQ ID NO: 4440 - DNA, 25 bp, Artificial Sequence
  Description of Artificial Sequence: Synthetic oligonucleotide
gtggccggctccggaggcttggtga

SEQ ID NO: 4441 - DNA, 25 bp, Artificial Sequence
  Description of Artificial Sequence: Synthetic oligonucleotide
tggccggctccggaggcttggtgac

SEQ ID NO: 4442 - DNA, 25 bp, Artificial Sequence
  Description of Artificial Sequence: Synthetic oligonucleotide
ggccggctccggaggcttggtgact

SEQ ID NO: 4443 - DNA, 25 bp, Artificial Sequence
  Description of Artificial Sequence: Synthetic oligonucleotide
gccggctccggaggcttggtgactc

SEQ ID NO: 4444 - DNA, 25 bp, Artificial Sequence
  Description of Artificial Sequence: Synthetic oligonucleotide
ccggctccggaggcttggtgactcc

SEQ ID NO: 4445 - DNA, 25 bp, Artificial Sequence
  Description of Artificial Sequence: Synthetic oligonucleotide
cggctccggaggcttggtgactcca

SEQ ID NO: 4446 - DNA, 25 bp, Artificial Sequence
  Description of Artificial Sequence: Synthetic oligonucleotide
ggctccggaggcttggtgactccag

SEQ ID NO: 4447 - DNA, 25 bp, Artificial Sequence
  Description of Artificial Sequence: Synthetic oligonucleotide
gctccggaggcttggtgactccagt

SEQ ID NO: 4448 - DNA, 25 bp, Artificial Sequence
  Description of Artificial Sequence: Synthetic oligonucleotide
ctccggaggcttggtgactccagtg

SEQ ID NO: 4449 - DNA, 25 bp, Artificial Sequence
  Description of Artificial Sequence: Synthetic oligonucleotide
tccggaggcttggtgactccagtgg

SEQ ID NO: 4450 - DNA, 25 bp, Artificial Sequence
  Description of Artificial Sequence: Synthetic oligonucleotide
ccggaggcttggtgactccagtggc

SEQ ID NO: 4451 - DNA, 25 bp, Artificial Sequence
  Description of Artificial Sequence: Synthetic oligonucleotide
cggaggcttggtgactccagtggcc

SEQ ID NO: 4452 - DNA, 25 bp, Artificial Sequence
  Description of Artificial Sequence: Synthetic oligonucleotide
ggaggcttggtgactccagtggccc

SEQ ID NO: 4453 - DNA, 25 bp, Artificial Sequence
  Description of Artificial Sequence: Synthetic oligonucleotide
gaggcttggtgactccagtggccca

SEQ ID NO: 4454 - DNA, 25 bp, Artificial Sequence
  Description of Artificial Sequence: Synthetic oligonucleotide
aggcttggtgactccagtggcccag

SEQ ID NO: 4455 - DNA, 25 bp, Artificial Sequence
  Description of Artificial Sequence: Synthetic oligonucleotide
ggcttggtgactccagtggcccagg

SEQ ID NO: 4456 - DNA, 25 bp, Artificial Sequence
  Description of Artificial Sequence: Synthetic oligonucleotide
gcttggtgactccagtggcccaggt

SEQ ID NO: 4457 - DNA, 25 bp, Artificial Sequence
  Description of Artificial Sequence: Synthetic oligonucleotide
cttggtgactccagtggcccaggta

SEQ ID NO: 4458 - DNA, 25 bp, Artificial Sequence
  Description of Artificial Sequence: Synthetic oligonucleotide
ttggtgactccagtggcccaggtag

SEQ ID NO: 4459 - DNA, 25 bp, Artificial Sequence
  Description of Artificial Sequence: Synthetic oligonucleotide
tggtgactccagtggcccaggtagg

SEQ ID NO: 4460 - DNA, 25 bp, Artificial Sequence
  Description of Artificial Sequence: Synthetic oligonucleotide
ggtgactccagtggcccaggtaggt

SEQ ID NO: 4461 - DNA, 25 bp, Artificial Sequence
  Description of Artificial Sequence: Synthetic oligonucleotide
gtgactccagtggcccaggtaggtg

SEQ ID NO: 4462 - DNA, 25 bp, Artificial Sequence
  Description of Artificial Sequence: Synthetic oligonucleotide
tgactccagtggcccaggtaggtgg

SEQ ID NO: 4463 - DNA, 25 bp, Artificial Sequence
  Description of Artificial Sequence: Synthetic oligonucleotide
gactccagtggcccaggtaggtggc

SEQ ID NO: 4464 - DNA, 25 bp, Artificial Sequence
  Description of Artificial Sequence: Synthetic oligonucleotide
actccagtggcccaggtaggtggct

SEQ ID NO: 4465 - DNA, 25 bp, Artificial Sequence
  Description of Artificial Sequence: Synthetic oligonucleotide
ctccagtggcccaggtaggtggctc

SEQ ID NO: 4466 - DNA, 25 bp, Artificial Sequence
  Description of Artificial Sequence: Synthetic oligonucleotide
tccagtggcccaggtaggtggctcg

SEQ ID NO: 4467 - DNA, 25 bp, Artificial Sequence
  Description of Artificial Sequence: Synthetic oligonucleotide
ccagtggcccaggtaggtggctcgc

SEQ ID NO: 4468 - DNA, 25 bp, Artificial Sequence
  Description of Artificial Sequence: Synthetic oligonucleotide
cagtggcccaggtaggtggctcgct

SEQ ID NO: 4469 - DNA, 25 bp, Artificial Sequence
  Description of Artificial Sequence: Synthetic oligonucleotide
agtggcccaggtaggtggctcgctc

SEQ ID NO: 4470 - DNA, 25 bp, Artificial Sequence
  Description of Artificial Sequence: Synthetic oligonucleotide
gtggcccaggtaggtggctcgctcc

SEQ ID NO: 4471 - DNA, 25 bp, Artificial Sequence
  Description of Artificial Sequence: Synthetic oligonucleotide
tggcccaggtaggtggctcgctccg

SEQ ID NO: 4472 - DNA, 25 bp, Artificial Sequence
  Description of Artificial Sequence: Synthetic oligonucleotide
ggcccaggtaggtggctcgctccgc

SEQ ID NO: 4473 - DNA, 25 bp, Artificial Sequence
  Description of Artificial Sequence: Synthetic oligonucleotide
gcccaggtaggtggctcgctccgct

SEQ ID NO: 4474 - DNA, 25 bp, Artificial Sequence
  Description of Artificial Sequence: Synthetic oligonucleotide
cccaggtaggtggctcgctccgctc

SEQ ID NO: 4475 - DNA, 25 bp, Artificial Sequence
  Description of Artificial Sequence: Synthetic oligonucleotide
ccaggtaggtggctcgctccgctct

SEQ ID NO: 4476 - DNA, 25 bp, Artificial Sequence
  Description of Artificial Sequence: Synthetic oligonucleotide
caggtaggtggctcgctccgctctg

SEQ ID NO: 4477 - DNA, 25 bp, Artificial Sequence
  Description of Artificial Sequence: Synthetic oligonucleotide
aggtaggtggctcgctccgctctgg

SEQ ID NO: 4478 - DNA, 25 bp, Artificial Sequence
  Description of Artificial Sequence: Synthetic oligonucleotide
ggtaggtggctcgctccgctctggc

SEQ ID NO: 4479 - DNA, 25 bp, Artificial Sequence
  Description of Artificial Sequence: Synthetic oligonucleotide
gtaggtggctcgctccgctctggcc

SEQ ID NO: 4480 - DNA, 25 bp, Artificial Sequence
  Description of Artificial Sequence: Synthetic oligonucleotide
taggtggctcgctccgctctggccc

SEQ ID NO: 4481 - DNA, 25 bp, Artificial Sequence
  Description of Artificial Sequence: Synthetic oligonucleotide
aggtggctcgctccgctctggcccc

SEQ ID NO: 4482 - DNA, 25 bp, Artificial Sequence
  Description of Artificial Sequence: Synthetic oligonucleotide
ggtggctcgctccgctctggcccca

SEQ ID NO: 4483 - DNA, 25 bp, Artificial Sequence
  Description of Artificial Sequence: Synthetic oligonucleotide
gtggctcgctccgctctggccccac

SEQ ID NO: 4484 - DNA, 25 bp, Artificial Sequence
  Description of Artificial Sequence: Synthetic oligonucleotide
tggctcgctccgctctggccccacc

SEQ ID NO: 4485 - DNA, 25 bp, Artificial Sequence
  Description of Artificial Sequence: Synthetic oligonucleotide
ggctcgctccgctctggccccaccc

SEQ ID NO: 4486 - DNA, 25 bp, Artificial Sequence
  Description of Artificial Sequence: Synthetic oligonucleotide
gctcgctccgctctggccccaccca

SEQ ID NO: 4487 - DNA, 25 bp, Artificial Sequence
  Description of Artificial Sequence: Synthetic oligonucleotide
ctcgctccgctctggccccacccag

SEQ ID NO: 4488 - DNA, 25 bp, Artificial Sequence
  Description of Artificial Sequence: Synthetic oligonucleotide
tcgctccgctctggccccacccagc

SEQ ID NO: 4489 - DNA, 25 bp, Artificial Sequence
  Description of Artificial Sequence: Synthetic oligonucleotide
cgctccgctctggccccacccagct

SEQ ID NO: 4490 - DNA, 25 bp, Artificial Sequence
  Description of Artificial Sequence: Synthetic oligonucleotide
gctccgctctggccccacccagctc

SEQ ID NO: 4491 - DNA, 25 bp, Artificial Sequence
  Description of Artificial Sequence: Synthetic oligonucleotide
ctccgctctggccccacccagctca

SEQ ID NO: 4492 - DNA, 25 bp, Artificial Sequence
  Description of Artificial Sequence: Synthetic oligonucleotide
tccgctctggccccacccagctcat

SEQ ID NO: 4493 - DNA, 25 bp, Artificial Sequence
  Description of Artificial Sequence: Synthetic oligonucleotide
ccgctctggccccacccagctcatg

SEQ ID NO: 4494 - DNA, 25 bp, Artificial Sequence
  Description of Artificial Sequence: Synthetic oligonucleotide
cgctctggccccacccagctcatgg

SEQ ID NO: 4495 - DNA, 25 bp, Artificial Sequence
  Description of Artificial Sequence: Synthetic oligonucleotide
gctctggccccacccagctcatggg

SEQ ID NO: 4496 - DNA, 25 bp, Artificial Sequence
  Description of Artificial Sequence: Synthetic oligonucleotide
ctctggccccacccagctcatgggt

SEQ ID NO: 4497 - DNA, 25 bp, Artificial Sequence
  Description of Artificial Sequence: Synthetic oligonucleotide
tctggccccacccagctcatgggtg

SEQ ID NO: 4498 - DNA, 25 bp, Artificial Sequence
  Description of Artificial Sequence: Synthetic oligonucleotide
ctggccccacccagctcatgggtgt

SEQ ID NO: 4499 - DNA, 25 bp, Artificial Sequence
  Description of Artificial Sequence: Synthetic oligonucleotide
tggccccacccagctcatgggtgtg

SEQ ID NO: 4500 - DNA, 25 bp, Artificial Sequence
  Description of Artificial Sequence: Synthetic oligonucleotide
ggccccacccagctcatgggtgtgt

SEQ ID NO: 4501 - DNA, 25 bp, Artificial Sequence
  Description of Artificial Sequence: Synthetic oligonucleotide
gccccacccagctcatgggtgtgtt

SEQ ID NO: 4502 - DNA, 25 bp, Artificial Sequence
  Description of Artificial Sequence: Synthetic oligonucleotide
ccccacccagctcatgggtgtgttt

SEQ ID NO: 4503 - DNA, 25 bp, Artificial Sequence
  Description of Artificial Sequence: Synthetic oligonucleotide
cccacccagctcatgggtgtgtttg

SEQ ID NO: 4504 - DNA, 25 bp, Artificial Sequence
  Description of Artificial Sequence: Synthetic oligonucleotide
ccacccagctcatgggtgtgtttgt

SEQ ID NO: 4505 - DNA, 25 bp, Artificial Sequence
  Description of Artificial Sequence: Synthetic oligonucleotide
atatgtaaagtggaatgtttagtca

SEQ ID NO: 4506 - DNA, 25 bp, Artificial Sequence
  Description of Artificial Sequence: Synthetic oligonucleotide
tatgtaaagtggaatgtttagtcat

SEQ ID NO: 4507 - DNA, 25 bp, Artificial Sequence
  Description of Artificial Sequence: Synthetic oligonucleotide
atgtaaagtggaatgtttagtcatt

SEQ ID NO: 4508 - DNA, 25 bp, Artificial Sequence
  Description of Artificial Sequence: Synthetic oligonucleotide
tgtaaagtggaatgtttagtcattt

SEQ ID NO: 4509 - DNA, 25 bp, Artificial Sequence
  Description of Artificial Sequence: Synthetic oligonucleotide
gtaaagtggaatgtttagtcatttg

SEQ ID NO: 4510 - DNA, 25 bp, Artificial Sequence
  Description of Artificial Sequence: Synthetic oligonucleotide
taaagtggaatgtttagtcatttgt

SEQ ID NO: 4511 - DNA, 25 bp, Artificial Sequence
  Description of Artificial Sequence: Synthetic oligonucleotide
aaagtggaatgtttagtcatttgtg

SEQ ID NO: 4512 - DNA, 25 bp, Artificial Sequence
  Description of Artificial Sequence: Synthetic oligonucleotide
aagtggaatgtttagtcatttgtga

SEQ ID NO: 4513 - DNA, 25 bp, Artificial Sequence
  Description of Artificial Sequence: Synthetic oligonucleotide
agtggaatgtttagtcatttgtgag

SEQ ID NO: 4514 - DNA, 25 bp, Artificial Sequence
  Description of Artificial Sequence: Synthetic oligonucleotide
gtggaatgtttagtcatttgtgaga

SEQ ID NO: 4515 - DNA, 25 bp, Artificial Sequence
  Description of Artificial Sequence: Synthetic oligonucleotide
tggaatgtttagtcatttgtgagaa

SEQ ID NO: 4516 - DNA, 25 bp, Artificial Sequence
  Description of Artificial Sequence: Synthetic oligonucleotide
ggaatgtttagtcatttgtgagaaa

SEQ ID NO: 4517 - DNA, 25 bp, Artificial Sequence
  Description of Artificial Sequence: Synthetic oligonucleotide
gaatgtttagtcatttgtgagaaag

SEQ ID NO: 4518 - DNA, 25 bp, Artificial Sequence
  Description of Artificial Sequence: Synthetic oligonucleotide
aatgtttagtcatttgtgagaaaga

SEQ ID NO: 4519 - DNA, 25 bp, Artificial Sequence
  Description of Artificial Sequence: Synthetic oligonucleotide
atgtttagtcatttgtgagaaagat

SEQ ID NO: 4520 - DNA, 25 bp, Artificial Sequence
  Description of Artificial Sequence: Synthetic oligonucleotide
tgtttagtcatttgtgagaaagatc

SEQ ID NO: 4521 - DNA, 25 bp, Artificial Sequence
  Description of Artificial Sequence: Synthetic oligonucleotide
gtttagtcatttgtgagaaagatcc

SEQ ID NO: 4522 - DNA, 25 bp, Artificial Sequence
  Description of Artificial Sequence: Synthetic oligonucleotide
tttagtcatttgtgagaaagatcct

SEQ ID NO: 4523 - DNA, 25 bp, Artificial Sequence
  Description of Artificial Sequence: Synthetic oligonucleotide
ttagtcatttgtgagaaagatcctg

SEQ ID NO: 4524 - DNA, 25 bp, Artificial Sequence
  Description of Artificial Sequence: Synthetic oligonucleotide
tagtcatttgtgagaaagatcctgc

SEQ ID NO: 4525 - DNA, 25 bp, Artificial Sequence
  Description of Artificial Sequence: Synthetic oligonucleotide
agtcatttgtgagaaagatcctgct

SEQ ID NO: 4526 - DNA, 25 bp, Artificial Sequence
  Description of Artificial Sequence: Synthetic oligonucleotide
gtcatttgtgagaaagatcctgcta

SEQ ID NO: 4527 - DNA, 25 bp, Artificial Sequence
  Description of Artificial Sequence: Synthetic oligonucleotide
tcatttgtgagaaagatcctgctac

SEQ ID NO: 4528 - DNA, 25 bp, Artificial Sequence
  Description of Artificial Sequence: Synthetic oligonucleotide
catttgtgagaaagatcctgctact

SEQ ID NO: 4529 - DNA, 25 bp, Artificial Sequence
  Description of Artificial Sequence: Synthetic oligonucleotide
atttgtgagaaagatcctgctactc

SEQ ID NO: 4530 - DNA, 25 bp, Artificial Sequence
  Description of Artificial Sequence: Synthetic oligonucleotide
tttgtgagaaagatcctgctactca

SEQ ID NO: 4531 - DNA, 25 bp, Artificial Sequence
  Description of Artificial Sequence: Synthetic oligonucleotide
ttgtgagaaagatcctgctactcac

SEQ ID NO: 4532 - DNA, 25 bp, Artificial Sequence
  Description of Artificial Sequence: Synthetic oligonucleotide
tgtgagaaagatcctgctactcact

SEQ ID NO: 4533 - DNA, 25 bp, Artificial Sequence
  Description of Artificial Sequence: Synthetic oligonucleotide
gtgagaaagatcctgctactcactt

SEQ ID NO: 4534 - DNA, 25 bp, Artificial Sequence
  Description of Artificial Sequence: Synthetic oligonucleotide
tgagaaagatcctgctactcacttc

SEQ ID NO: 4535 - DNA, 25 bp, Artificial Sequence
  Description of Artificial Sequence: Synthetic oligonucleotide
gagaaagatcctgctactcacttct

SEQ ID NO: 4536 - DNA, 25 bp, Artificial Sequence
  Description of Artificial Sequence: Synthetic oligonucleotide
agaaagatcctgctactcacttctt

SEQ ID NO: 4537 - DNA, 25 bp, Artificial Sequence
  Description of Artificial Sequence: Synthetic oligonucleotide
gaaagatcctgctactcacttcttg

SEQ ID NO: 4538 - DNA, 25 bp, Artificial Sequence
  Description of Artificial Sequence: Synthetic oligonucleotide
aaagatcctgctactcacttcttgg

SEQ ID NO: 4539 - DNA, 25 bp, Artificial Sequence
  Description of Artificial Sequence: Synthetic oligonucleotide
aagatcctgctactcacttcttggt

SEQ ID NO: 4540 - DNA, 25 bp, Artificial Sequence
  Description of Artificial Sequence: Synthetic oligonucleotide
agatcctgctactcacttcttggta

SEQ ID NO: 4541 - DNA, 25 bp, Artificial Sequence
  Description of Artificial Sequence: Synthetic oligonucleotide
gatcctgctactcacttcttggtac

SEQ ID NO: 4542 - DNA, 25 bp, Artificial Sequence
  Description of Artificial Sequence: Synthetic oligonucleotide
atcctgctactcacttcttggtacg

SEQ ID NO: 4543 - DNA, 25 bp, Artificial Sequence
  Description of Artificial Sequence: Synthetic oligonucleotide
tcctgctactcacttcttggtacgc

SEQ ID NO: 4544 - DNA, 25 bp, Artificial Sequence
  Description of Artificial Sequence: Synthetic oligonucleotide
cctgctactcacttcttggtacgca

SEQ ID NO: 4545 - DNA, 25 bp, Artificial Sequence
  Description of Artificial Sequence: Synthetic oligonucleotide
ctgctactcacttcttggtacgcat

SEQ ID NO: 4546 - DNA, 25 bp, Artificial Sequence
  Description of Artificial Sequence: Synthetic oligonucleotide
tgctactcacttcttggtacgcatt

SEQ ID NO: 4547 - DNA, 25 bp, Artificial Sequence
  Description of Artificial Sequence: Synthetic oligonucleotide
gctactcacttcttggtacgcattc

SEQ ID NO: 4548 - DNA, 25 bp, Artificial Sequence
  Description of Artificial Sequence: Synthetic oligonucleotide
ctactcacttcttggtacgcattca

SEQ ID NO: 4549 - DNA, 25 bp, Artificial Sequence
  Description of Artificial Sequence: Synthetic oligonucleotide
tactcacttcttggtacgcattcat

SEQ ID NO: 4550 - DNA, 25 bp, Artificial Sequence
  Description of Artificial Sequence: Synthetic oligonucleotide
actcacttcttggtacgcattcatt

SEQ ID NO: 4551 - DNA, 25 bp, Artificial Sequence
  Description of Artificial Sequence: Synthetic oligonucleotide
ctcacttcttggtacgcattcattt

SEQ ID NO: 4552 - DNA, 25 bp, Artificial Sequence
  Description of Artificial Sequence: Synthetic oligonucleotide
tcacttcttggtacgcattcatttg

SEQ ID NO: 4553 - DNA, 25 bp, Artificial Sequence
  Description of Artificial Sequence: Synthetic oligonucleotide
cacttcttggtacgcattcatttgt

SEQ ID NO: 4554 - DNA, 25 bp, Artificial Sequence
  Description of Artificial Sequence: Synthetic oligonucleotide
acttcttggtacgcattcatttgta

SEQ ID NO: 4555 - DNA, 25 bp, Artificial Sequence
  Description of Artificial Sequence: Synthetic oligonucleotide
cttcttggtacgcattcatttgtaa

SEQ ID NO: 4556 - DNA, 25 bp, Artificial Sequence
  Description of Artificial Sequence: Synthetic oligonucleotide
ttcttggtacgcattcatttgtaac

SEQ ID NO: 4557 - DNA, 25 bp, Artificial Sequence
  Description of Artificial Sequence: Synthetic oligonucleotide
tcttggtacgcattcatttgtaact

SEQ ID NO: 4558 - DNA, 25 bp, Artificial Sequence
  Description of Artificial Sequence: Synthetic oligonucleotide
cttggtacgcattcatttgtaactg

SEQ ID NO: 4559 - DNA, 25 bp, Artificial Sequence
  Description of Artificial Sequence: Synthetic oligonucleotide
ttggtacgcattcatttgtaactgg

SEQ ID NO: 4560 - DNA, 25 bp, Artificial Sequence
  Description of Artificial Sequence: Synthetic oligonucleotide
tggtacgcattcatttgtaactggc

SEQ ID NO: 4561 - DNA, 25 bp, Artificial Sequence
  Description of Artificial Sequence: Synthetic oligonucleotide
ggtacgcattcatttgtaactggct

SEQ ID NO: 4562 - DNA, 25 bp, Artificial Sequence
  Description of Artificial Sequence: Synthetic oligonucleotide
gtacgcattcatttgtaactggctt

SEQ ID NO: 4563 - DNA, 25 bp, Artificial Sequence
  Description of Artificial Sequence: Synthetic oligonucleotide
tacgcattcatttgtaactggcttc

SEQ ID NO: 4564 - DNA, 25 bp, Artificial Sequence
  Description of Artificial Sequence: Synthetic oligonucleotide
acgcattcatttgtaactggcttct

SEQ ID NO: 4565 - DNA, 25 bp, Artificial Sequence
  Description of Artificial Sequence: Synthetic oligonucleotide
cgcattcatttgtaactggcttctg

SEQ ID NO: 4566 - DNA, 25 bp, Artificial Sequence
  Description of Artificial Sequence: Synthetic oligonucleotide
gcattcatttgtaactggcttctga

SEQ ID NO: 4567 - DNA, 25 bp, Artificial Sequence
  Description of Artificial Sequence: Synthetic oligonucleotide
cattcatttgtaactggcttctgat

SEQ ID NO: 4568 - DNA, 25 bp, Artificial Sequence
  Description of Artificial Sequence: Synthetic oligonucleotide
attcatttgtaactggcttctgatc

SEQ ID NO: 4569 - DNA, 25 bp, Artificial Sequence
  Description of Artificial Sequence: Synthetic oligonucleotide
ttcatttgtaactggcttctgatct

SEQ ID NO: 4570 - DNA, 25 bp, Artificial Sequence
  Description of Artificial Sequence: Synthetic oligonucleotide
tcatttgtaactggcttctgatctg

SEQ ID NO: 4571 - DNA, 25 bp, Artificial Sequence
  Description of Artificial Sequence: Synthetic oligonucleotide
catttgtaactggcttctgatctgg

SEQ ID NO: 4572 - DNA, 25 bp, Artificial Sequence
  Description of Artificial Sequence: Synthetic oligonucleotide
atttgtaactggcttctgatctggt

SEQ ID NO: 4573 - DNA, 25 bp, Artificial Sequence
  Description of Artificial Sequence: Synthetic oligonucleotide
tttgtaactggcttctgatctggtt

SEQ ID NO: 4574 - DNA, 25 bp, Artificial Sequence
  Description of Artificial Sequence: Synthetic oligonucleotide
ttgtaactggcttctgatctggttt

SEQ ID NO: 4575 - DNA, 25 bp, Artificial Sequence
  Description of Artificial Sequence: Synthetic oligonucleotide
tgtaactggcttctgatctggtttc

SEQ ID NO: 4576 - DNA, 25 bp, Artificial Sequence
  Description of Artificial Sequence: Synthetic oligonucleotide
gtaactggcttctgatctggtttct

SEQ ID NO: 4577 - DNA, 25 bp, Artificial Sequence
  Description of Artificial Sequence: Synthetic oligonucleotide
taactggcttctgatctggtttctc

SEQ ID NO: 4578 - DNA, 25 bp, Artificial Sequence
  Description of Artificial Sequence: Synthetic oligonucleotide
aactggcttctgatctggtttctca

SEQ ID NO: 4579 - DNA, 25 bp, Artificial Sequence
  Description of Artificial Sequence: Synthetic oligonucleotide
actggcttctgatctggtttctcat

SEQ ID NO: 4580 - DNA, 25 bp, Artificial Sequence
  Description of Artificial Sequence: Synthetic oligonucleotide
ctggcttctgatctggtttctcatc

SEQ ID NO: 4581 - DNA, 25 bp, Artificial Sequence
  Description of Artificial Sequence: Synthetic oligonucleotide
tggcttctgatctggtttctcatct

SEQ ID NO: 4582 - DNA, 25 bp, Artificial Sequence
  Description of Artificial Sequence: Synthetic oligonucleotide
ggcttctgatctggtttctcatcta

SEQ ID NO: 4583 - DNA, 25 bp, Artificial Sequence
  Description of Artificial Sequence: Synthetic oligonucleotide
gcttctgatctggtttctcatctac

SEQ ID NO: 4584 - DNA, 25 bp, Artificial Sequence
  Description of Artificial Sequence: Synthetic oligonucleotide
cttctgatctggtttctcatctact

SEQ ID NO: 4585 - DNA, 25 bp, Artificial Sequence
  Description of Artificial Sequence: Synthetic oligonucleotide
ttctgatctggtttctcatctactc

SEQ ID NO: 4586 - DNA, 25 bp, Artificial Sequence
  Description of Artificial Sequence: Synthetic oligonucleotide
tctgatctggtttctcatctactca

SEQ ID NO: 4587 - DNA, 25 bp, Artificial Sequence
  Description of Artificial Sequence: Synthetic oligonucleotide
ctgatctggtttctcatctactcag

SEQ ID NO: 4588 - DNA, 25 bp, Artificial Sequence
  Description of Artificial Sequence: Synthetic oligonucleotide
tgatctggtttctcatctactcagg

SEQ ID NO: 4589 - DNA, 25 bp, Artificial Sequence
  Description of Artificial Sequence: Synthetic oligonucleotide
gatctggtttctcatctactcagga

SEQ ID NO: 4590 - DNA, 25 bp, Artificial Sequence
  Description of Artificial Sequence: Synthetic oligonucleotide
atctggtttctcatctactcaggag

SEQ ID NO: 4591 - DNA, 25 bp, Artificial Sequence
  Description of Artificial Sequence: Synthetic oligonucleotide
tctggtttctcatctactcaggagg

SEQ ID NO: 4592 - DNA, 25 bp, Artificial Sequence
  Description of Artificial Sequence: Synthetic oligonucleotide
ctggtttctcatctactcaggaggg

SEQ ID NO: 4593 - DNA, 25 bp, Artificial Sequence
  Description of Artificial Sequence: Synthetic oligonucleotide
tggtttctcatctactcaggagggc

SEQ ID NO: 4594 - DNA, 25 bp, Artificial Sequence
  Description of Artificial Sequence: Synthetic oligonucleotide
ggtttctcatctactcaggagggca

SEQ ID NO: 4595 - DNA, 25 bp, Artificial Sequence
  Description of Artificial Sequence: Synthetic oligonucleotide
gtttctcatctactcaggagggcaa

SEQ ID NO: 4596 - DNA, 25 bp, Artificial Sequence
  Description of Artificial Sequence: Synthetic oligonucleotide
tttctcatctactcaggagggcaac

SEQ ID NO: 4597 - DNA, 25 bp, Artificial Sequence
  Description of Artificial Sequence: Synthetic oligonucleotide
ttctcatctactcaggagggcaaca

SEQ ID NO: 4598 - DNA, 25 bp, Artificial Sequence
  Description of Artificial Sequence: Synthetic oligonucleotide
tctcatctactcaggagggcaacat

SEQ ID NO: 4599 - DNA, 25 bp, Artificial Sequence
  Description of Artificial Sequence: Synthetic oligonucleotide
ctcatctactcaggagggcaacatt

SEQ ID NO: 4600 - DNA, 25 bp, Artificial Sequence
  Description of Artificial Sequence: Synthetic oligonucleotide
tcatctactcaggagggcaacattg

SEQ ID NO: 4601 - DNA, 25 bp, Artificial Sequence
  Description of Artificial Sequence: Synthetic oligonucleotide
catctactcaggagggcaacattga

SEQ ID NO: 4602 - DNA, 25 bp, Artificial Sequence
  Description of Artificial Sequence: Synthetic oligonucleotide
atctactcaggagggcaacattgag

SEQ ID NO: 4603 - DNA, 25 bp, Artificial Sequence
  Description of Artificial Sequence: Synthetic oligonucleotide
tctactcaggagggcaacattgaga

SEQ ID NO: 4604 - DNA, 25 bp, Artificial Sequence
  Description of Artificial Sequence: Synthetic oligonucleotide
ctactcaggagggcaacattgagaa

SEQ ID NO: 4605 - DNA, 25 bp, Artificial Sequence
  Description of Artificial Sequence: Synthetic oligonucleotide
tactcaggagggcaacattgagaat

SEQ ID NO: 4606 - DNA, 25 bp, Artificial Sequence
  Description of Artificial Sequence: Synthetic oligonucleotide
actcaggagggcaacattgagaata

SEQ ID NO: 4607 - DNA, 25 bp, Artificial Sequence
  Description of Artificial Sequence: Synthetic oligonucleotide
ctcaggagggcaacattgagaataa

SEQ ID NO: 4608 - DNA, 25 bp, Artificial Sequence
  Description of Artificial Sequence: Synthetic oligonucleotide
tcaggagggcaacattgagaataaa

SEQ ID NO: 4609 - DNA, 25 bp, Artificial Sequence
  Description of Artificial Sequence: Synthetic oligonucleotide
caggagggcaacattgagaataaat

SEQ ID NO: 4610 - DNA, 25 bp, Artificial Sequence
  Description of Artificial Sequence: Synthetic oligonucleotide
aggagggcaacattgagaataaata

SEQ ID NO: 4611 - DNA, 25 bp, Artificial Sequence
  Description of Artificial Sequence: Synthetic oligonucleotide
ggagggcaacattgagaataaatac

SEQ ID NO: 4612 - DNA, 25 bp, Artificial Sequence
  Description of Artificial Sequence: Synthetic oligonucleotide
gagggcaacattgagaataaatacc

SEQ ID NO: 4613 - DNA, 25 bp, Artificial Sequence
  Description of Artificial Sequence: Synthetic oligonucleotide
agggcaacattgagaataaatacca

SEQ ID NO: 4614 - DNA, 25 bp, Artificial Sequence
  Description of Artificial Sequence: Synthetic oligonucleotide
gggcaacattgagaataaataccat

SEQ ID NO: 4615 - DNA, 25 bp, Artificial Sequence
  Description of Artificial Sequence: Synthetic oligonucleotide
ggcaacattgagaataaataccatt

SEQ ID NO: 4616 - DNA, 25 bp, Artificial Sequence
  Description of Artificial Sequence: Synthetic oligonucleotide
gcaacattgagaataaataccattt

SEQ ID NO: 4617 - DNA, 25 bp, Artificial Sequence
  Description of Artificial Sequence: Synthetic oligonucleotide
caacattgagaataaataccatttt

SEQ ID NO: 4618 - DNA, 25 bp, Artificial Sequence
  Description of Artificial Sequence: Synthetic oligonucleotide
aacattgagaataaataccatttta

SEQ ID NO: 4619 - DNA, 25 bp, Artificial Sequence
  Description of Artificial Sequence: Synthetic oligonucleotide
acattgagaataaataccattttaa

SEQ ID NO: 4620 - DNA, 25 bp, Artificial Sequence
  Description of Artificial Sequence: Synthetic oligonucleotide
cattgagaataaataccattttaac

SEQ ID NO: 4621 - DNA, 25 bp, Artificial Sequence
  Description of Artificial Sequence: Synthetic oligonucleotide
attgagaataaataccattttaaca

SEQ ID NO: 4622 - DNA, 25 bp, Artificial Sequence
  Description of Artificial Sequence: Synthetic oligonucleotide
ttgagaataaataccattttaacag

SEQ ID NO: 4623 - DNA, 25 bp, Artificial Sequence
  Description of Artificial Sequence: Synthetic oligonucleotide
tgagaataaataccattttaacaga

SEQ ID NO: 4624 - DNA, 25 bp, Artificial Sequence
  Description of Artificial Sequence: Synthetic oligonucleotide
gagaataaataccattttaacagaa

SEQ ID NO: 4625 - DNA, 25 bp, Artificial Sequence
  Description of Artificial Sequence: Synthetic oligonucleotide
agaataaataccattttaacagaag

SEQ ID NO: 4626 - DNA, 25 bp, Artificial Sequence
  Description of Artificial Sequence: Synthetic oligonucleotide
gaataaataccattttaacagaagg

SEQ ID NO: 4627 - DNA, 25 bp, Artificial Sequence
  Description of Artificial Sequence: Synthetic oligonucleotide
aataaataccattttaacagaagga

SEQ ID NO: 4628 - DNA, 25 bp, Artificial Sequence
  Description of Artificial Sequence: Synthetic oligonucleotide
ataaataccattttaacagaaggat

SEQ ID NO: 4629 - DNA, 25 bp, Artificial Sequence
  Description of Artificial Sequence: Synthetic oligonucleotide
taaataccattttaacagaaggatt

SEQ ID NO: 4630 - DNA, 25 bp, Artificial Sequence
  Description of Artificial Sequence: Synthetic oligonucleotide
ccgccctcactcacccctaacacgg

SEQ ID NO: 4631 - DNA, 25 bp, Artificial Sequence
  Description of Artificial Sequence: Synthetic oligonucleotide
cgccctcactcacccctaacacggg

SEQ ID NO: 4632 - DNA, 25 bp, Artificial Sequence
  Description of Artificial Sequence: Synthetic oligonucleotide
gccctcactcacccctaacacgggc

SEQ ID NO: 4633 - DNA, 25 bp, Artificial Sequence
  Description of Artificial Sequence: Synthetic oligonucleotide
ccctcactcacccctaacacgggcc

SEQ ID NO: 4634 - DNA, 25 bp, Artificial Sequence
  Description of Artificial Sequence: Synthetic oligonucleotide
cctcactcacccctaacacgggcct

SEQ ID NO: 4635 - DNA, 25 bp, Artificial Sequence
  Description of Artificial Sequence: Synthetic oligonucleotide
ctcactcacccctaacacgggcctc

SEQ ID NO: 4636 - DNA, 25 bp, Artificial Sequence
  Description of Artificial Sequence: Synthetic oligonucleotide
tcactcacccctaacacgggcctct

SEQ ID NO: 4637 - DNA, 25 bp, Artificial Sequence
  Description of Artificial Sequence: Synthetic oligonucleotide
cactcacccctaacacgggcctctc

SEQ ID NO: 4638 - DNA, 25 bp, Artificial Sequence
  Description of Artificial Sequence: Synthetic oligonucleotide
actcacccctaacacgggcctctcc

SEQ ID NO: 4639 - DNA, 25 bp, Artificial Sequence
  Description of Artificial Sequence: Synthetic oligonucleotide
ctcacccctaacacgggcctctccg

SEQ ID NO: 4640 - DNA, 25 bp, Artificial Sequence
  Description of Artificial Sequence: Synthetic oligonucleotide
tcacccctaacacgggcctctccgc

SEQ ID NO: 4641 - DNA, 25 bp, Artificial Sequence
  Description of Artificial Sequence: Synthetic oligonucleotide
cacccctaacacgggcctctccgct

SEQ ID NO: 4642 - DNA, 25 bp, Artificial Sequence
  Description of Artificial Sequence: Synthetic oligonucleotide
acccctaacacgggcctctccgctg

SEQ ID NO: 4643 - DNA, 25 bp, Artificial Sequence
  Description of Artificial Sequence: Synthetic oligonucleotide
cccctaacacgggcctctccgctgc

SEQ ID NO: 4644 - DNA, 25 bp, Artificial Sequence
  Description of Artificial Sequence: Synthetic oligonucleotide
ccctaacacgggcctctccgctgct

SEQ ID NO: 4645 - DNA, 25 bp, Artificial Sequence
  Description of Artificial Sequence: Synthetic oligonucleotide
cctaacacgggcctctccgctgctt

SEQ ID NO: 4646 - DNA, 25 bp, Artificial Sequence
  Description of Artificial Sequence: Synthetic oligonucleotide
ctaacacgggcctctccgctgcttt

SEQ ID NO: 4647 - DNA, 25 bp, Artificial Sequence
  Description of Artificial Sequence: Synthetic oligonucleotide
taacacgggcctctccgctgctttt

SEQ ID NO: 4648 - DNA, 25 bp, Artificial Sequence
  Description of Artificial Sequence: Synthetic oligonucleotide
aacacgggcctctccgctgcttttg

SEQ ID NO: 4649 - DNA, 25 bp, Artificial Sequence
  Description of Artificial Sequence: Synthetic oligonucleotide
acacgggcctctccgctgcttttgt

SEQ ID NO: 4650 - DNA, 25 bp, Artificial Sequence
  Description of Artificial Sequence: Synthetic oligonucleotide
cacgggcctctccgctgcttttgtt

SEQ ID NO: 4651 - DNA, 25 bp, Artificial Sequence
  Description of Artificial Sequence: Synthetic oligonucleotide
acgggcctctccgctgcttttgttt

SEQ ID NO: 4652 - DNA, 25 bp, Artificial Sequence
  Description of Artificial Sequence: Synthetic oligonucleotide
cgggcctctccgctgcttttgtttc

SEQ ID NO: 4653 - DNA, 25 bp, Artificial Sequence
  Description of Artificial Sequence: Synthetic oligonucleotide
gggcctctccgctgcttttgtttcc

SEQ ID NO: 4654 - DNA, 25 bp, Artificial Sequence
  Description of Artificial Sequence: Synthetic oligonucleotide
ggcctctccgctgcttttgtttcct

SEQ ID NO: 4655 - DNA, 25 bp, Artificial Sequence
  Description of Artificial Sequence: Synthetic oligonucleotide
gcctctccgctgcttttgtttccta

SEQ ID NO: 4656 - DNA, 25 bp, Artificial Sequence
  Description of Artificial Sequence: Synthetic oligonucleotide
cctctccgctgcttttgtttcctag

SEQ ID NO: 4657 - DNA, 25 bp, Artificial Sequence
  Description of Artificial Sequence: Synthetic oligonucleotide
ctctccgctgcttttgtttcctagc

SEQ ID NO: 4658 - DNA, 25 bp, Artificial Sequence
  Description of Artificial Sequence: Synthetic oligonucleotide
tctccgctgcttttgtttcctagcc

SEQ ID NO: 4659 - DNA, 25 bp, Artificial Sequence
  Description of Artificial Sequence: Synthetic oligonucleotide
ctccgctgcttttgtttcctagcct

SEQ ID NO: 4660 - DNA, 25 bp, Artificial Sequence
  Description of Artificial Sequence: Synthetic oligonucleotide
tccgctgcttttgtttcctagccta

SEQ ID NO: 4661 - DNA, 25 bp, Artificial Sequence
  Description of Artificial Sequence: Synthetic oligonucleotide
ccgctgcttttgtttcctagcctaa

SEQ ID NO: 4662 - DNA, 25 bp, Artificial Sequence
  Description of Artificial Sequence: Synthetic oligonucleotide
cgctgcttttgtttcctagcctaac

SEQ ID NO: 4663 - DNA, 25 bp, Artificial Sequence
  Description of Artificial Sequence: Synthetic oligonucleotide
gctgcttttgtttcctagcctaacc

SEQ ID NO: 4664 - DNA, 25 bp, Artificial Sequence
  Description of Artificial Sequence: Synthetic oligonucleotide
ctgcttttgtttcctagcctaacca

SEQ ID NO: 4665 - DNA, 25 bp, Artificial Sequence
  Description of Artificial Sequence: Synthetic oligonucleotide
tgcttttgtttcctagcctaaccat

SEQ ID NO: 4666 - DNA, 25 bp, Artificial Sequence
  Description of Artificial Sequence: Synthetic oligonucleotide
gcttttgtttcctagcctaaccatg

SEQ ID NO: 4667 - DNA, 25 bp, Artificial Sequence
  Description of Artificial Sequence: Synthetic oligonucleotide
cttttgtttcctagcctaaccatgc

SEQ ID NO: 4668 - DNA, 25 bp, Artificial Sequence
  Description of Artificial Sequence: Synthetic oligonucleotide
ttttgtttcctagcctaaccatgcc

SEQ ID NO: 4669 - DNA, 25 bp, Artificial Sequence
  Description of Artificial Sequence: Synthetic oligonucleotide
tttgtttcctagcctaaccatgcca

SEQ ID NO: 4670 - DNA, 25 bp, Artificial Sequence
  Description of Artificial Sequence: Synthetic oligonucleotide
ttgtttcctagcctaaccatgccag

SEQ ID NO: 4671 - DNA, 25 bp, Artificial Sequence
  Description of Artificial Sequence: Synthetic oligonucleotide
tgtttcctagcctaaccatgccagg

SEQ ID NO: 4672 - DNA, 25 bp, Artificial Sequence
  Description of Artificial Sequence: Synthetic oligonucleotide
gtttcctagcctaaccatgccaggg

SEQ ID NO: 4673 - DNA, 25 bp, Artificial Sequence
  Description of Artificial Sequence: Synthetic oligonucleotide
tttcctagcctaaccatgccagggt

SEQ ID NO: 4674 - DNA, 25 bp, Artificial Sequence
  Description of Artificial Sequence: Synthetic oligonucleotide
ttcctagcctaaccatgccagggtc

SEQ ID NO: 4675 - DNA, 25 bp, Artificial Sequence
  Description of Artificial Sequence: Synthetic oligonucleotide
tcctagcctaaccatgccagggtcc

SEQ ID NO: 4676 - DNA, 25 bp, Artificial Sequence
  Description of Artificial Sequence: Synthetic oligonucleotide
cctagcctaaccatgccagggtccc

SEQ ID NO: 4677 - DNA, 25 bp, Artificial Sequence
  Description of Artificial Sequence: Synthetic oligonucleotide
ctagcctaaccatgccagggtcccg

SEQ ID NO: 4678 - DNA, 25 bp, Artificial Sequence
  Description of Artificial Sequence: Synthetic oligonucleotide
tagcctaaccatgccagggtcccgg

SEQ ID NO: 4679 - DNA, 25 bp, Artificial Sequence
  Description of Artificial Sequence: Synthetic oligonucleotide
agcctaaccatgccagggtcccggg

SEQ ID NO: 4680 - DNA, 25 bp, Artificial Sequence
  Description of Artificial Sequence: Synthetic oligonucleotide
gcctaaccatgccagggtcccgggc

SEQ ID NO: 4681 - DNA, 25 bp, Artificial Sequence
  Description of Artificial Sequence: Synthetic oligonucleotide
cctaaccatgccagggtcccgggcc

SEQ ID NO: 4682 - DNA, 25 bp, Artificial Sequence
  Description of Artificial Sequence: Synthetic oligonucleotide
ctaaccatgccagggtcccgggcct

SEQ ID NO: 4683 - DNA, 25 bp, Artificial Sequence
  Description of Artificial Sequence: Synthetic oligonucleotide
taaccatgccagggtcccgggcctc

SEQ ID NO: 4684 - DNA, 25 bp, Artificial Sequence
  Description of Artificial Sequence: Synthetic oligonucleotide
aaccatgccagggtcccgggcctcc

SEQ ID NO: 4685 - DNA, 25 bp, Artificial Sequence
  Description of Artificial Sequence: Synthetic oligonucleotide
accatgccagggtcccgggcctcca

SEQ ID NO: 4686 - DNA, 25 bp, Artificial Sequence
  Description of Artificial Sequence: Synthetic oligonucleotide
ccatgccagggtcccgggcctccac

SEQ ID NO: 4687 - DNA, 25 bp, Artificial Sequence
  Description of Artificial Sequence: Synthetic oligonucleotide
catgccagggtcccgggcctccacg

SEQ ID NO: 4688 - DNA, 25 bp, Artificial Sequence
  Description of Artificial Sequence: Synthetic oligonucleotide
atgccagggtcccgggcctccacgg

SEQ ID NO: 4689 - DNA, 25 bp, Artificial Sequence
  Description of Artificial Sequence: Synthetic oligonucleotide
tgccagggtcccgggcctccacggc

SEQ ID NO: 4690 - DNA, 25 bp, Artificial Sequence
  Description of Artificial Sequence: Synthetic oligonucleotide
gccagggtcccgggcctccacggct

SEQ ID NO: 4691 - DNA, 25 bp, Artificial Sequence
  Description of Artificial Sequence: Synthetic oligonucleotide
ccagggtcccgggcctccacggctt

SEQ ID NO: 4692 - DNA, 25 bp, Artificial Sequence
  Description of Artificial Sequence: Synthetic oligonucleotide
cagggtcccgggcctccacggcttc

SEQ ID NO: 4693 - DNA, 25 bp, Artificial Sequence
  Description of Artificial Sequence: Synthetic oligonucleotide
agggtcccgggcctccacggcttct

SEQ ID NO: 4694 - DNA, 25 bp, Artificial Sequence
  Description of Artificial Sequence: Synthetic oligonucleotide
gggtcccgggcctccacggcttctg

SEQ ID NO: 4695 - DNA, 25 bp, Artificial Sequence
  Description of Artificial Sequence: Synthetic oligonucleotide
ggtcccgggcctccacggcttctgc

SEQ ID NO: 4696 - DNA, 25 bp, Artificial Sequence
  Description of Artificial Sequence: Synthetic oligonucleotide
gtcccgggcctccacggcttctgct

SEQ ID NO: 4697 - DNA, 25 bp, Artificial Sequence
  Description of Artificial Sequence: Synthetic oligonucleotide
tcccgggcctccacggcttctgctt

SEQ ID NO: 4698 - DNA, 25 bp, Artificial Sequence
  Description of Artificial Sequence: Synthetic oligonucleotide
cccgggcctccacggcttctgcttc

SEQ ID NO: 4699 - DNA, 25 bp, Artificial Sequence
  Description of Artificial Sequence: Synthetic oligonucleotide
ccgggcctccacggcttctgcttct

SEQ ID NO: 4700 - DNA, 25 bp, Artificial Sequence
  Description of Artificial Sequence: Synthetic oligonucleotide
cgggcctccacggcttctgcttctg

SEQ ID NO: 4701 - DNA, 25 bp, Artificial Sequence
  Description of Artificial Sequence: Synthetic oligonucleotide
gggcctccacggcttctgcttctgc

SEQ ID NO: 4702 - DNA, 25 bp, Artificial Sequence
  Description of Artificial Sequence: Synthetic oligonucleotide
ggcctccacggcttctgcttctgcc

SEQ ID NO: 4703 - DNA, 25 bp, Artificial Sequence
  Description of Artificial Sequence: Synthetic oligonucleotide
gcctccacggcttctgcttctgccg

SEQ ID NO: 4704 - DNA, 25 bp, Artificial Sequence
  Description of Artificial Sequence: Synthetic oligonucleotide
cctccacggcttctgcttctgccgc

SEQ ID NO: 4705 - DNA, 25 bp, Artificial Sequence
  Description of Artificial Sequence: Synthetic oligonucleotide
ctccacggcttctgcttctgccgca

SEQ ID NO: 4706 - DNA, 25 bp, Artificial Sequence
  Description of Artificial Sequence: Synthetic oligonucleotide
tccacggcttctgcttctgccgcag

SEQ ID NO: 4707 - DNA, 25 bp, Artificial Sequence
  Description of Artificial Sequence: Synthetic oligonucleotide
ccacggcttctgcttctgccgcagt

SEQ ID NO: 4708 - DNA, 25 bp, Artificial Sequence
  Description of Artificial Sequence: Synthetic oligonucleotide
cacggcttctgcttctgccgcagtc

SEQ ID NO: 4709 - DNA, 25 bp, Artificial Sequence
  Description of Artificial Sequence: Synthetic oligonucleotide
acggcttctgcttctgccgcagtct

SEQ ID NO: 4710 - DNA, 25 bp, Artificial Sequence
  Description of Artificial Sequence: Synthetic oligonucleotide
cggcttctgcttctgccgcagtctc

SEQ ID NO: 4711 - DNA, 25 bp, Artificial Sequence
  Description of Artificial Sequence: Synthetic oligonucleotide
ggcttctgcttctgccgcagtctct

SEQ ID NO: 4712 - DNA, 25 bp, Artificial Sequence
  Description of Artificial Sequence: Synthetic oligonucleotide
gcttctgcttctgccgcagtctctg

SEQ ID NO: 4713 - DNA, 25 bp, Artificial Sequence
  Description of Artificial Sequence: Synthetic oligonucleotide
cttctgcttctgccgcagtctctgc

SEQ ID NO: 4714 - DNA, 25 bp, Artificial Sequence
  Description of Artificial Sequence: Synthetic oligonucleotide
ttctgcttctgccgcagtctctgcg

SEQ ID NO: 4715 - DNA, 25 bp, Artificial Sequence
  Description of Artificial Sequence: Synthetic oligonucleotide
tctgcttctgccgcagtctctgcgg

SEQ ID NO: 4716 - DNA, 25 bp, Artificial Sequence
  Description of Artificial Sequence: Synthetic oligonucleotide
ctgcttctgccgcagtctctgcggc

SEQ ID NO: 4717 - DNA, 25 bp, Artificial Sequence
  Description of Artificial Sequence: Synthetic oligonucleotide
tgcttctgccgcagtctctgcggcc

SEQ ID NO: 4718 - DNA, 25 bp, Artificial Sequence
  Description of Artificial Sequence: Synthetic oligonucleotide
gcttctgccgcagtctctgcggccc

SEQ ID NO: 4719 - DNA, 25 bp, Artificial Sequence
  Description of Artificial Sequence: Synthetic oligonucleotide
cttctgccgcagtctctgcggcccg

SEQ ID NO: 4720 - DNA, 25 bp, Artificial Sequence
  Description of Artificial Sequence: Synthetic oligonucleotide
ttctgccgcagtctctgcggcccgg

SEQ ID NO: 4721 - DNA, 25 bp, Artificial Sequence
  Description of Artificial Sequence: Synthetic oligonucleotide
tctgccgcagtctctgcggcccggc

SEQ ID NO: 4722 - DNA, 25 bp, Artificial Sequence
  Description of Artificial Sequence: Synthetic oligonucleotide
ctgccgcagtctctgcggcccggcc

SEQ ID NO: 4723 - DNA, 25 bp, Artificial Sequence
  Description of Artificial Sequence: Synthetic oligonucleotide
tgccgcagtctctgcggcccggccc

SEQ ID NO: 4724 - DNA, 25 bp, Artificial Sequence
  Description of Artificial Sequence: Synthetic oligonucleotide
gccgcagtctctgcggcccggcccc

SEQ ID NO: 4725 - DNA, 25 bp, Artificial Sequence
  Description of Artificial Sequence: Synthetic oligonucleotide
ccgcagtctctgcggcccggccccg

SEQ ID NO: 4726 - DNA, 25 bp, Artificial Sequence
  Description of Artificial Sequence: Synthetic oligonucleotide
cgcagtctctgcggcccggccccgc

SEQ ID NO: 4727 - DNA, 25 bp, Artificial Sequence
  Description of Artificial Sequence: Synthetic oligonucleotide
gcagtctctgcggcccggccccgcc

SEQ ID NO: 4728 - DNA, 25 bp, Artificial Sequence
  Description of Artificial Sequence: Synthetic oligonucleotide
cagtctctgcggcccggccccgcca

SEQ ID NO: 4729 - DNA, 25 bp, Artificial Sequence
  Description of Artificial Sequence: Synthetic oligonucleotide
agtctctgcggcccggccccgccag

SEQ ID NO: 4730 - DNA, 25 bp, Artificial Sequence
  Description of Artificial Sequence: Synthetic oligonucleotide
gtctctgcggcccggccccgccagc

SEQ ID NO: 4731 - DNA, 25 bp, Artificial Sequence
  Description of Artificial Sequence: Synthetic oligonucleotide
tctctgcggcccggccccgccagca

SEQ ID NO: 4732 - DNA, 25 bp, Artificial Sequence
  Description of Artificial Sequence: Synthetic oligonucleotide
ctctgcggcccggccccgccagcac

SEQ ID NO: 4733 - DNA, 25 bp, Artificial Sequence
  Description of Artificial Sequence: Synthetic oligonucleotide
tctgcggcccggccccgccagcacc

SEQ ID NO: 4734 - DNA, 25 bp, Artificial Sequence
  Description of Artificial Sequence: Synthetic oligonucleotide
ctgcggcccggccccgccagcacca

SEQ ID NO: 4735 - DNA, 25 bp, Artificial Sequence
  Description of Artificial Sequence: Synthetic oligonucleotide
tgcggcccggccccgccagcaccag

SEQ ID NO: 4736 - DNA, 25 bp, Artificial Sequence
  Description of Artificial Sequence: Synthetic oligonucleotide
gcggcccggccccgccagcaccaga

SEQ ID NO: 4737 - DNA, 25 bp, Artificial Sequence
  Description of Artificial Sequence: Synthetic oligonucleotide
cggcccggccccgccagcaccagaa

SEQ ID NO: 4738 - DNA, 25 bp, Artificial Sequence
  Description of Artificial Sequence: Synthetic oligonucleotide
ggcccggccccgccagcaccagaaa

SEQ ID NO: 4739 - DNA, 25 bp, Artificial Sequence
  Description of Artificial Sequence: Synthetic oligonucleotide
gcccggccccgccagcaccagaaat

SEQ ID NO: 4740 - DNA, 25 bp, Artificial Sequence
  Description of Artificial Sequence: Synthetic oligonucleotide
cccggccccgccagcaccagaaatc

SEQ ID NO: 4741 - DNA, 25 bp, Artificial Sequence
  Description of Artificial Sequence: Synthetic oligonucleotide
ccggccccgccagcaccagaaatcc

SEQ ID NO: 4742 - DNA, 25 bp, Artificial Sequence
  Description of Artificial Sequence: Synthetic oligonucleotide
cggccccgccagcaccagaaatcca

SEQ ID NO: 4743 - DNA, 25 bp, Artificial Sequence
  Description of Artificial Sequence: Synthetic oligonucleotide
ggccccgccagcaccagaaatccat

SEQ ID NO: 4744 - DNA, 25 bp, Artificial Sequence
  Description of Artificial Sequence: Synthetic oligonucleotide
gccccgccagcaccagaaatccatg

SEQ ID NO: 4745 - DNA, 25 bp, Artificial Sequence
  Description of Artificial Sequence: Synthetic oligonucleotide
ccccgccagcaccagaaatccatgt

SEQ ID NO: 4746 - DNA, 25 bp, Artificial Sequence
  Description of Artificial Sequence: Synthetic oligonucleotide
cccgccagcaccagaaatccatgtc

SEQ ID NO: 4747 - DNA, 25 bp, Artificial Sequence
  Description of Artificial Sequence: Synthetic oligonucleotide
ccgccagcaccagaaatccatgtcg

SEQ ID NO: 4748 - DNA, 25 bp, Artificial Sequence
  Description of Artificial Sequence: Synthetic oligonucleotide
cgccagcaccagaaatccatgtcgg

SEQ ID NO: 4749 - DNA, 25 bp, Artificial Sequence
  Description of Artificial Sequence: Synthetic oligonucleotide
gccagcaccagaaatccatgtcggc

SEQ ID NO: 4750 - DNA, 25 bp, Artificial Sequence
  Description of Artificial Sequence: Synthetic oligonucleotide
ccagcaccagaaatccatgtcggcc

SEQ ID NO: 4751 - DNA, 25 bp, Artificial Sequence
  Description of Artificial Sequence: Synthetic oligonucleotide
cagcaccagaaatccatgtcggcct

SEQ ID NO: 4752 - DNA, 25 bp, Artificial Sequence
  Description of Artificial Sequence: Synthetic oligonucleotide
agcaccagaaatccatgtcggcctc

SEQ ID NO: 4753 - DNA, 25 bp, Artificial Sequence
  Description of Artificial Sequence: Synthetic oligonucleotide
gcaccagaaatccatgtcggcctcc

SEQ ID NO: 4754 - DNA, 25 bp, Artificial Sequence
  Description of Artificial Sequence: Synthetic oligonucleotide
caccagaaatccatgtcggcctccg

SEQ ID NO: 4755 - DNA, 25 bp, Artificial Sequence
  Description of Artificial Sequence: Synthetic oligonucleotide
accagaaatccatgtcggcctccgt

SEQ ID NO: 4756 - DNA, 25 bp, Artificial Sequence
  Description of Artificial Sequence: Synthetic oligonucleotide
ccagaaatccatgtcggcctccgtg

SEQ ID NO: 4757 - DNA, 25 bp, Artificial Sequence
  Description of Artificial Sequence: Synthetic oligonucleotide
cagaaatccatgtcggcctccgtgc

SEQ ID NO: 4758 - DNA, 25 bp, Artificial Sequence
  Description of Artificial Sequence: Synthetic oligonucleotide
agaaatccatgtcggcctccgtgca

SEQ ID NO: 4759 - DNA, 25 bp, Artificial Sequence
  Description of Artificial Sequence: Synthetic oligonucleotide
gaaatccatgtcggcctccgtgcac

SEQ ID NO: 4760 - DNA, 25 bp, Artificial Sequence
  Description of Artificial Sequence: Synthetic oligonucleotide
aaatccatgtcggcctccgtgcacc

SEQ ID NO: 4761 - DNA, 25 bp, Artificial Sequence
  Description of Artificial Sequence: Synthetic oligonucleotide
aatccatgtcggcctccgtgcaccc

SEQ ID NO: 4762 - DNA, 25 bp, Artificial Sequence
  Description of Artificial Sequence: Synthetic oligonucleotide
atccatgtcggcctccgtgcacccc

SEQ ID NO: 4763 - DNA, 25 bp, Artificial Sequence
  Description of Artificial Sequence: Synthetic oligonucleotide
tccatgtcggcctccgtgcacccca

SEQ ID NO: 4764 - DNA, 25 bp, Artificial Sequence
  Description of Artificial Sequence: Synthetic oligonucleotide
ccatgtcggcctccgtgcaccccaa

SEQ ID NO: 4765 - DNA, 25 bp, Artificial Sequence
  Description of Artificial Sequence: Synthetic oligonucleotide
catgtcggcctccgtgcaccccaac

SEQ ID NO: 4766 - DNA, 25 bp, Artificial Sequence
  Description of Artificial Sequence: Synthetic oligonucleotide
atgtcggcctccgtgcaccccaaca

SEQ ID NO: 4767 - DNA, 25 bp, Artificial Sequence
  Description of Artificial Sequence: Synthetic oligonucleotide
tgtcggcctccgtgcaccccaacaa

SEQ ID NO: 4768 - DNA, 25 bp, Artificial Sequence
  Description of Artificial Sequence: Synthetic oligonucleotide
gtcggcctccgtgcaccccaacaag

SEQ ID NO: 4769 - DNA, 25 bp, Artificial Sequence
  Description of Artificial Sequence: Synthetic oligonucleotide
tcggcctccgtgcaccccaacaagg

SEQ ID NO: 4770 - DNA, 25 bp, Artificial Sequence
  Description of Artificial Sequence: Synthetic oligonucleotide
cggcctccgtgcaccccaacaaggc

SEQ ID NO: 4771 - DNA, 25 bp, Artificial Sequence
  Description of Artificial Sequence: Synthetic oligonucleotide
ggcctccgtgcaccccaacaaggcc

SEQ ID NO: 4772 - DNA, 25 bp, Artificial Sequence
  Description of Artificial Sequence: Synthetic oligonucleotide
gcctccgtgcaccccaacaaggcct

SEQ ID NO: 4773 - DNA, 25 bp, Artificial Sequence
  Description of Artificial Sequence: Synthetic oligonucleotide
cctccgtgcaccccaacaaggcctc

SEQ ID NO: 4774 - DNA, 25 bp, Artificial Sequence
  Description of Artificial Sequence: Synthetic oligonucleotide
ctccgtgcaccccaacaaggcctct

SEQ ID NO: 4775 - DNA, 25 bp, Artificial Sequence
  Description of Artificial Sequence: Synthetic oligonucleotide
tccgtgcaccccaacaaggcctctg

SEQ ID NO: 4776 - DNA, 25 bp, Artificial Sequence
  Description of Artificial Sequence: Synthetic oligonucleotide
ccgtgcaccccaacaaggcctctgg

SEQ ID NO: 4777 - DNA, 25 bp, Artificial Sequence
  Description of Artificial Sequence: Synthetic oligonucleotide
cgtgcaccccaacaaggcctctggg

SEQ ID NO: 4778 - DNA, 25 bp, Artificial Sequence
  Description of Artificial Sequence: Synthetic oligonucleotide
gtgcaccccaacaaggcctctgggc

SEQ ID NO: 4779 - DNA, 25 bp, Artificial Sequence
  Description of Artificial Sequence: Synthetic oligonucleotide
tgcaccccaacaaggcctctgggct

SEQ ID NO: 4780 - DNA, 25 bp, Artificial Sequence
  Description of Artificial Sequence: Synthetic oligonucleotide
gcaccccaacaaggcctctgggctg

SEQ ID NO: 4781 - DNA, 25 bp, Artificial Sequence
  Description of Artificial Sequence: Synthetic oligonucleotide
caccccaacaaggcctctgggctgc

SEQ ID NO: 4782 - DNA, 25 bp, Artificial Sequence
  Description of Artificial Sequence: Synthetic oligonucleotide
accccaacaaggcctctgggctgcc

SEQ ID NO: 4783 - DNA, 25 bp, Artificial Sequence
  Description of Artificial Sequence: Synthetic oligonucleotide
ccccaacaaggcctctgggctgccc

SEQ ID NO: 4784 - DNA, 25 bp, Artificial Sequence
  Description of Artificial Sequence: Synthetic oligonucleotide
cccaacaaggcctctgggctgcccc

SEQ ID NO: 4785 - DNA, 25 bp, Artificial Sequence
  Description of Artificial Sequence: Synthetic oligonucleotide
ccaacaaggcctctgggctgccccc

SEQ ID NO: 4786 - DNA, 25 bp, Artificial Sequence
  Description of Artificial Sequence: Synthetic oligonucleotide
caacaaggcctctgggctgcccccc

SEQ ID NO: 4787 - DNA, 25 bp, Artificial Sequence
  Description of Artificial Sequence: Synthetic oligonucleotide
aacaaggcctctgggctgcccccca

SEQ ID NO: 4788 - DNA, 25 bp, Artificial Sequence
  Description of Artificial Sequence: Synthetic oligonucleotide
acaaggcctctgggctgccccccac

SEQ ID NO: 4789 - DNA, 25 bp, Artificial Sequence
  Description of Artificial Sequence: Synthetic oligonucleotide
caaggcctctgggctgccccccacg

SEQ ID NO: 4790 - DNA, 25 bp, Artificial Sequence
  Description of Artificial Sequence: Synthetic oligonucleotide
aaggcctctgggctgccccccacgg

SEQ ID NO: 4791 - DNA, 25 bp, Artificial Sequence
  Description of Artificial Sequence: Synthetic oligonucleotide
aggcctctgggctgccccccacgga

SEQ ID NO: 4792 - DNA, 25 bp, Artificial Sequence
  Description of Artificial Sequence: Synthetic oligonucleotide
ggcctctgggctgccccccacggag

SEQ ID NO: 4793 - DNA, 25 bp, Artificial Sequence
  Description of Artificial Sequence: Synthetic oligonucleotide
gcctctgggctgccccccacggaga

SEQ ID NO: 4794 - DNA, 25 bp, Artificial Sequence
  Description of Artificial Sequence: Synthetic oligonucleotide
cctctgggctgccccccacggagag

SEQ ID NO: 4795 - DNA, 25 bp, Artificial Sequence
  Description of Artificial Sequence: Synthetic oligonucleotide
ctctgggctgccccccacggagagt

SEQ ID NO: 4796 - DNA, 25 bp, Artificial Sequence
  Description of Artificial Sequence: Synthetic oligonucleotide
tctgggctgccccccacggagagta

SEQ ID NO: 4797 - DNA, 25 bp, Artificial Sequence
  Description of Artificial Sequence: Synthetic oligonucleotide
ctgggctgccccccacggagagtaa

SEQ ID NO: 4798 - DNA, 25 bp, Artificial Sequence
  Description of Artificial Sequence: Synthetic oligonucleotide
tgggctgccccccacggagagtaac

SEQ ID NO: 4799 - DNA, 25 bp, Artificial Sequence
  Description of Artificial Sequence: Synthetic oligonucleotide
gggctgccccccacggagagtaact

SEQ ID NO: 4800 - DNA, 25 bp, Artificial Sequence
  Description of Artificial Sequence: Synthetic oligonucleotide
ggctgccccccacggagagtaactg

SEQ ID NO: 4801 - DNA, 25 bp, Artificial Sequence
  Description of Artificial Sequence: Synthetic oligonucleotide
gctgccccccacggagagtaactgt

SEQ ID NO: 4802 - DNA, 25 bp, Artificial Sequence
  Description of Artificial Sequence: Synthetic oligonucleotide
ctgccccccacggagagtaactgtg

SEQ ID NO: 4803 - DNA, 25 bp, Artificial Sequence
  Description of Artificial Sequence: Synthetic oligonucleotide
tgccccccacggagagtaactgtga

SEQ ID NO: 4804 - DNA, 25 bp, Artificial Sequence
  Description of Artificial Sequence: Synthetic oligonucleotide
gccccccacggagagtaactgtgag

SEQ ID NO: 4805 - DNA, 25 bp, Artificial Sequence
  Description of Artificial Sequence: Synthetic oligonucleotide
ccccccacggagagtaactgtgagg

SEQ ID NO: 4806 - DNA, 25 bp, Artificial Sequence
  Description of Artificial Sequence: Synthetic oligonucleotide
cccccacggagagtaactgtgaggt

SEQ ID NO: 4807 - DNA, 25 bp, Artificial Sequence
  Description of Artificial Sequence: Synthetic oligonucleotide
ccccacggagagtaactgtgaggtg

SEQ ID NO: 4808 - DNA, 25 bp, Artificial Sequence
  Description of Artificial Sequence: Synthetic oligonucleotide
cccacggagagtaactgtgaggtgc

SEQ ID NO: 4809 - DNA, 25 bp, Artificial Sequence
  Description of Artificial Sequence: Synthetic oligonucleotide
ccacggagagtaactgtgaggtgcc

SEQ ID NO: 4810 - DNA, 25 bp, Artificial Sequence
  Description of Artificial Sequence: Synthetic oligonucleotide
cacggagagtaactgtgaggtgccg

SEQ ID NO: 4811 - DNA, 25 bp, Artificial Sequence
  Description of Artificial Sequence: Synthetic oligonucleotide
acggagagtaactgtgaggtgccgc

SEQ ID NO: 4812 - DNA, 25 bp, Artificial Sequence
  Description of Artificial Sequence: Synthetic oligonucleotide
cggagagtaactgtgaggtgccgcg

SEQ ID NO: 4813 - DNA, 25 bp, Artificial Sequence
  Description of Artificial Sequence: Synthetic oligonucleotide
ggagagtaactgtgaggtgccgcgg

SEQ ID NO: 4814 - DNA, 25 bp, Artificial Sequence
  Description of Artificial Sequence: Synthetic oligonucleotide
gagagtaactgtgaggtgccgcggc

SEQ ID NO: 4815 - DNA, 25 bp, Artificial Sequence
  Description of Artificial Sequence: Synthetic oligonucleotide
agagtaactgtgaggtgccgcggcc

SEQ ID NO: 4816 - DNA, 25 bp, Artificial Sequence
  Description of Artificial Sequence: Synthetic oligonucleotide
gagtaactgtgaggtgccgcggccc

SEQ ID NO: 4817 - DNA, 25 bp, Artificial Sequence
  Description of Artificial Sequence: Synthetic oligonucleotide
agtaactgtgaggtgccgcggccca

SEQ ID NO: 4818 - DNA, 25 bp, Artificial Sequence
  Description of Artificial Sequence: Synthetic oligonucleotide
gtaactgtgaggtgccgcggcccag

SEQ ID NO: 4819 - DNA, 25 bp, Artificial Sequence
  Description of Artificial Sequence: Synthetic oligonucleotide
taactgtgaggtgccgcggcccagg

SEQ ID NO: 4820 - DNA, 25 bp, Artificial Sequence
  Description of Artificial Sequence: Synthetic oligonucleotide
aactgtgaggtgccgcggcccaggc

SEQ ID NO: 4821 - DNA, 25 bp, Artificial Sequence
  Description of Artificial Sequence: Synthetic oligonucleotide
actgtgaggtgccgcggcccaggca

SEQ ID NO: 4822 - DNA, 25 bp, Artificial Sequence
  Description of Artificial Sequence: Synthetic oligonucleotide
ctgtgaggtgccgcggcccaggcaa

SEQ ID NO: 4823 - DNA, 25 bp, Artificial Sequence
  Description of Artificial Sequence: Synthetic oligonucleotide
tgtgaggtgccgcggcccaggcaag

SEQ ID NO: 4824 - DNA, 25 bp, Artificial Sequence
  Description of Artificial Sequence: Synthetic oligonucleotide
gtgaggtgccgcggcccaggcaagt

SEQ ID NO: 4825 - DNA, 25 bp, Artificial Sequence
  Description of Artificial Sequence: Synthetic oligonucleotide
tgaggtgccgcggcccaggcaagtg

SEQ ID NO: 4826 - DNA, 25 bp, Artificial Sequence
  Description of Artificial Sequence: Synthetic oligonucleotide
gaggtgccgcggcccaggcaagtgt

SEQ ID NO: 4827 - DNA, 25 bp, Artificial Sequence
  Description of Artificial Sequence: Synthetic oligonucleotide
aggtgccgcggcccaggcaagtgtg

SEQ ID NO: 4828 - DNA, 25 bp, Artificial Sequence
  Description of Artificial Sequence: Synthetic oligonucleotide
ggtgccgcggcccaggcaagtgtgc

SEQ ID NO: 4829 - DNA, 25 bp, Artificial Sequence
  Description of Artificial Sequence: Synthetic oligonucleotide
gtgccgcggcccaggcaagtgtgct

SEQ ID NO: 4830 - DNA, 25 bp, Artificial Sequence
  Description of Artificial Sequence: Synthetic oligonucleotide
tgccgcggcccaggcaagtgtgctg

SEQ ID NO: 4831 - DNA, 25 bp, Artificial Sequence
  Description of Artificial Sequence: Synthetic oligonucleotide
gccgcggcccaggcaagtgtgctgg

SEQ ID NO: 4832 - DNA, 25 bp, Artificial Sequence
  Description of Artificial Sequence: Synthetic oligonucleotide
ccgcggcccaggcaagtgtgctggg

SEQ ID NO: 4833 - DNA, 25 bp, Artificial Sequence
  Description of Artificial Sequence: Synthetic oligonucleotide
cgcggcccaggcaagtgtgctgggg

SEQ ID NO: 4834 - DNA, 25 bp, Artificial Sequence
  Description of Artificial Sequence: Synthetic oligonucleotide
gcggcccaggcaagtgtgctggggc

SEQ ID NO: 4835 - DNA, 25 bp, Artificial Sequence
  Description of Artificial Sequence: Synthetic oligonucleotide
cggcccaggcaagtgtgctggggca

SEQ ID NO: 4836 - DNA, 25 bp, Artificial Sequence
  Description of Artificial Sequence: Synthetic oligonucleotide
ggcccaggcaagtgtgctggggcag

SEQ ID NO: 4837 - DNA, 25 bp, Artificial Sequence
  Description of Artificial Sequence: Synthetic oligonucleotide
gcccaggcaagtgtgctggggcagc

SEQ ID NO: 4838 - DNA, 25 bp, Artificial Sequence
  Description of Artificial Sequence: Synthetic oligonucleotide
cccaggcaagtgtgctggggcagct

SEQ ID NO: 4839 - DNA, 25 bp, Artificial Sequence
  Description of Artificial Sequence: Synthetic oligonucleotide
ccaggcaagtgtgctggggcagctg

SEQ ID NO: 4840 - DNA, 25 bp, Artificial Sequence
  Description of Artificial Sequence: Synthetic oligonucleotide
caggcaagtgtgctggggcagctgg

SEQ ID NO: 4841 - DNA, 25 bp, Artificial Sequence
  Description of Artificial Sequence: Synthetic oligonucleotide
aggcaagtgtgctggggcagctggt

SEQ ID NO: 4842 - DNA, 25 bp, Artificial Sequence
  Description of Artificial Sequence: Synthetic oligonucleotide
ggcaagtgtgctggggcagctggtg

SEQ ID NO: 4843 - DNA, 25 bp, Artificial Sequence
  Description of Artificial Sequence: Synthetic oligonucleotide
gcaagtgtgctggggcagctggtgc

SEQ ID NO: 4844 - DNA, 25 bp, Artificial Sequence
  Description of Artificial Sequence: Synthetic oligonucleotide
caagtgtgctggggcagctggtgca

SEQ ID NO: 4845 - DNA, 25 bp, Artificial Sequence
  Description of Artificial Sequence: Synthetic oligonucleotide
aagtgtgctggggcagctggtgcac

SEQ ID NO: 4846 - DNA, 25 bp, Artificial Sequence
  Description of Artificial Sequence: Synthetic oligonucleotide
agtgtgctggggcagctggtgcacc

SEQ ID NO: 4847 - DNA, 25 bp, Artificial Sequence
  Description of Artificial Sequence: Synthetic oligonucleotide
gtgtgctggggcagctggtgcacct

SEQ ID NO: 4848 - DNA, 25 bp, Artificial Sequence
  Description of Artificial Sequence: Synthetic oligonucleotide
tgtgctggggcagctggtgcacctg

SEQ ID NO: 4849 - DNA, 25 bp, Artificial Sequence
  Description of Artificial Sequence: Synthetic oligonucleotide
gtgctggggcagctggtgcacctgc

SEQ ID NO: 4850 - DNA, 25 bp, Artificial Sequence
  Description of Artificial Sequence: Synthetic oligonucleotide
tgctggggcagctggtgcacctgct

SEQ ID NO: 4851 - DNA, 25 bp, Artificial Sequence
  Description of Artificial Sequence: Synthetic oligonucleotide
gctggggcagctggtgcacctgctg

SEQ ID NO: 4852 - DNA, 25 bp, Artificial Sequence
  Description of Artificial Sequence: Synthetic oligonucleotide
ctggggcagctggtgcacctgctgc

SEQ ID NO: 4853 - DNA, 25 bp, Artificial Sequence
  Description of Artificial Sequence: Synthetic oligonucleotide
tggggcagctggtgcacctgctgcc

SEQ ID NO: 4854 - DNA, 25 bp, Artificial Sequence
  Description of Artificial Sequence: Synthetic oligonucleotide
ggggcagctggtgcacctgctgccc

SEQ ID NO: 4855 - DNA, 25 bp, Artificial Sequence
  Description of Artificial Sequence: Synthetic oligonucleotide
gggcagctggtgcacctgctgccct

SEQ ID NO: 4856 - DNA, 25 bp, Artificial Sequence
  Description of Artificial Sequence: Synthetic oligonucleotide
ggcagctggtgcacctgctgccctc

SEQ ID NO: 4857 - DNA, 25 bp, Artificial Sequence
  Description of Artificial Sequence: Synthetic oligonucleotide
gcagctggtgcacctgctgccctca

SEQ ID NO: 4858 - DNA, 25 bp, Artificial Sequence
  Description of Artificial Sequence: Synthetic oligonucleotide
cagctggtgcacctgctgccctcag

SEQ ID NO: 4859 - DNA, 25 bp, Artificial Sequence
  Description of Artificial Sequence: Synthetic oligonucleotide
agctggtgcacctgctgccctcagc

SEQ ID NO: 4860 - DNA, 25 bp, Artificial Sequence
  Description of Artificial Sequence: Synthetic oligonucleotide
gctggtgcacctgctgccctcagcc

SEQ ID NO: 4861 - DNA, 25 bp, Artificial Sequence
  Description of Artificial Sequence: Synthetic oligonucleotide
ctggtgcacctgctgccctcagccc

SEQ ID NO: 4862 - DNA, 25 bp, Artificial Sequence
  Description of Artificial Sequence: Synthetic oligonucleotide
tggtgcacctgctgccctcagccca

SEQ ID NO: 4863 - DNA, 25 bp, Artificial Sequence
  Description of Artificial Sequence: Synthetic oligonucleotide
ggtgcacctgctgccctcagcccac

SEQ ID NO: 4864 - DNA, 25 bp, Artificial Sequence
  Description of Artificial Sequence: Synthetic oligonucleotide
gtgcacctgctgccctcagcccacc

SEQ ID NO: 4865 - DNA, 25 bp, Artificial Sequence
  Description of Artificial Sequence: Synthetic oligonucleotide
tgcacctgctgccctcagcccaccc

SEQ ID NO: 4866 - DNA, 25 bp, Artificial Sequence
  Description of Artificial Sequence: Synthetic oligonucleotide
gcacctgctgccctcagcccaccct

SEQ ID NO: 4867 - DNA, 25 bp, Artificial Sequence
  Description of Artificial Sequence: Synthetic oligonucleotide
cacctgctgccctcagcccacccta

SEQ ID NO: 4868 - DNA, 25 bp, Artificial Sequence
  Description of Artificial Sequence: Synthetic oligonucleotide
acctgctgccctcagcccaccctac

SEQ ID NO: 4869 - DNA, 25 bp, Artificial Sequence
  Description of Artificial Sequence: Synthetic oligonucleotide
aatgttcctatcaattttcatttta

SEQ ID NO: 4870 - DNA, 25 bp, Artificial Sequence
  Description of Artificial Sequence: Synthetic oligonucleotide
atgttcctatcaattttcattttac

SEQ ID NO: 4871 - DNA, 25 bp, Artificial Sequence
  Description of Artificial Sequence: Synthetic oligonucleotide
tgttcctatcaattttcattttacc

SEQ ID NO: 4872 - DNA, 25 bp, Artificial Sequence
  Description of Artificial Sequence: Synthetic oligonucleotide
gttcctatcaattttcattttacca

SEQ ID NO: 4873 - DNA, 25 bp, Artificial Sequence
  Description of Artificial Sequence: Synthetic oligonucleotide
ttcctatcaattttcattttaccaa

SEQ ID NO: 4874 - DNA, 25 bp, Artificial Sequence
  Description of Artificial Sequence: Synthetic oligonucleotide
tcctatcaattttcattttaccaac

SEQ ID NO: 4875 - DNA, 25 bp, Artificial Sequence
  Description of Artificial Sequence: Synthetic oligonucleotide
cctatcaattttcattttaccaact

SEQ ID NO: 4876 - DNA, 25 bp, Artificial Sequence
  Description of Artificial Sequence: Synthetic oligonucleotide
ctatcaattttcattttaccaacta

SEQ ID NO: 4877 - DNA, 25 bp, Artificial Sequence
  Description of Artificial Sequence: Synthetic oligonucleotide
tatcaattttcattttaccaactat

SEQ ID NO: 4878 - DNA, 25 bp, Artificial Sequence
  Description of Artificial Sequence: Synthetic oligonucleotide
atcaattttcattttaccaactatt

SEQ ID NO: 4879 - DNA, 25 bp, Artificial Sequence
  Description of Artificial Sequence: Synthetic oligonucleotide
tcaattttcattttaccaactattt

SEQ ID NO: 4880 - DNA, 25 bp, Artificial Sequence
  Description of Artificial Sequence: Synthetic oligonucleotide
caattttcattttaccaactatttt

SEQ ID NO: 4881 - DNA, 25 bp, Artificial Sequence
  Description of Artificial Sequence: Synthetic oligonucleotide
aattttcattttaccaactattttt

SEQ ID NO: 4882 - DNA, 25 bp, Artificial Sequence
  Description of Artificial Sequence: Synthetic oligonucleotide
attttcattttaccaactatttttt

SEQ ID NO: 4883 - DNA, 25 bp, Artificial Sequence
  Description of Artificial Sequence: Synthetic oligonucleotide
ttttcattttaccaactattttttt

SEQ ID NO: 4884 - DNA, 25 bp, Artificial Sequence
  Description of Artificial Sequence: Synthetic oligonucleotide
tttcattttaccaactatttttttc

SEQ ID NO: 4885 - DNA, 25 bp, Artificial Sequence
  Description of Artificial Sequence: Synthetic oligonucleotide
ttcattttaccaactatttttttct

SEQ ID NO: 4886 - DNA, 25 bp, Artificial Sequence
  Description of Artificial Sequence: Synthetic oligonucleotide
tcattttaccaactatttttttctt

SEQ ID NO: 4887 - DNA, 25 bp, Artificial Sequence
  Description of Artificial Sequence: Synthetic oligonucleotide
cattttaccaactatttttttcttc

SEQ ID NO: 4888 - DNA, 25 bp, Artificial Sequence
  Description of Artificial Sequence: Synthetic oligonucleotide
attttaccaactatttttttcttct

SEQ ID NO: 4889 - DNA, 25 bp, Artificial Sequence
  Description of Artificial Sequence: Synthetic oligonucleotide
ttttaccaactatttttttcttctt

SEQ ID NO: 4890 - DNA, 25 bp, Artificial Sequence
  Description of Artificial Sequence: Synthetic oligonucleotide
tttaccaactatttttttcttcttg

SEQ ID NO: 4891 - DNA, 25 bp, Artificial Sequence
  Description of Artificial Sequence: Synthetic oligonucleotide
ttaccaactatttttttcttcttgg

SEQ ID NO: 4892 - DNA, 25 bp, Artificial Sequence
  Description of Artificial Sequence: Synthetic oligonucleotide
taccaactatttttttcttcttggt

SEQ ID NO: 4893 - DNA, 25 bp, Artificial Sequence
  Description of Artificial Sequence: Synthetic oligonucleotide
accaactatttttttcttcttggtc

SEQ ID NO: 4894 - DNA, 25 bp, Artificial Sequence
  Description of Artificial Sequence: Synthetic oligonucleotide
ccaactatttttttcttcttggtca

SEQ ID NO: 4895 - DNA, 25 bp, Artificial Sequence
  Description of Artificial Sequence: Synthetic oligonucleotide
caactatttttttcttcttggtcag

SEQ ID NO: 4896 - DNA, 25 bp, Artificial Sequence
  Description of Artificial Sequence: Synthetic oligonucleotide
aactatttttttcttcttggtcaga

SEQ ID NO: 4897 - DNA, 25 bp, Artificial Sequence
  Description of Artificial Sequence: Synthetic oligonucleotide
actatttttttcttcttggtcagaa

SEQ ID NO: 4898 - DNA, 25 bp, Artificial Sequence
  Description of Artificial Sequence: Synthetic oligonucleotide
ctatttttttcttcttggtcagaat

SEQ ID NO: 4899 - DNA, 25 bp, Artificial Sequence
  Description of Artificial Sequence: Synthetic oligonucleotide
tatttttttcttcttggtcagaatt

SEQ ID NO: 4900 - DNA, 25 bp, Artificial Sequence
  Description of Artificial Sequence: Synthetic oligonucleotide
atttttttcttcttggtcagaatta

SEQ ID NO: 4901 - DNA, 25 bp, Artificial Sequence
  Description of Artificial Sequence: Synthetic oligonucleotide
tttttttcttcttggtcagaattag

SEQ ID NO: 4902 - DNA, 25 bp, Artificial Sequence
  Description of Artificial Sequence: Synthetic oligonucleotide
ttttttcttcttggtcagaattagg

SEQ ID NO: 4903 - DNA, 25 bp, Artificial Sequence
  Description of Artificial Sequence: Synthetic oligonucleotide
tttttcttcttggtcagaattaggt

SEQ ID NO: 4904 - DNA, 25 bp, Artificial Sequence
  Description of Artificial Sequence: Synthetic oligonucleotide
ttttcttcttggtcagaattaggtc

SEQ ID NO: 4905 - DNA, 25 bp, Artificial Sequence
  Description of Artificial Sequence: Synthetic oligonucleotide
tttcttcttggtcagaattaggtcc

SEQ ID NO: 4906 - DNA, 25 bp, Artificial Sequence
  Description of Artificial Sequence: Synthetic oligonucleotide
ttcttcttggtcagaattaggtcca

SEQ ID NO: 4907 - DNA, 25 bp, Artificial Sequence
  Description of Artificial Sequence: Synthetic oligonucleotide
tcttcttggtcagaattaggtccag

SEQ ID NO: 4908 - DNA, 25 bp, Artificial Sequence
  Description of Artificial Sequence: Synthetic oligonucleotide
cttcttggtcagaattaggtccaga

SEQ ID NO: 4909 - DNA, 25 bp, Artificial Sequence
  Description of Artificial Sequence: Synthetic oligonucleotide
ttcttggtcagaattaggtccagag

SEQ ID NO: 4910 - DNA, 25 bp, Artificial Sequence
  Description of Artificial Sequence: Synthetic oligonucleotide
tcttggtcagaattaggtccagagt

SEQ ID NO: 4911 - DNA, 25 bp, Artificial Sequence
  Description of Artificial Sequence: Synthetic oligonucleotide
cttggtcagaattaggtccagagtt

SEQ ID NO: 4912 - DNA, 25 bp, Artificial Sequence
  Description of Artificial Sequence: Synthetic oligonucleotide
ttggtcagaattaggtccagagttg

SEQ ID NO: 4913 - DNA, 25 bp, Artificial Sequence
  Description of Artificial Sequence: Synthetic oligonucleotide
tggtcagaattaggtccagagttga

SEQ ID NO: 4914 - DNA, 25 bp, Artificial Sequence
  Description of Artificial Sequence: Synthetic oligonucleotide
ggtcagaattaggtccagagttgaa

SEQ ID NO: 4915 - DNA, 25 bp, Artificial Sequence
  Description of Artificial Sequence: Synthetic oligonucleotide
gtcagaattaggtccagagttgaag

SEQ ID NO: 4916 - DNA, 25 bp, Artificial Sequence
  Description of Artificial Sequence: Synthetic oligonucleotide
tcagaattaggtccagagttgaagt

SEQ ID NO: 4917 - DNA, 25 bp, Artificial Sequence
  Description of Artificial Sequence: Synthetic oligonucleotide
cagaattaggtccagagttgaagtt

SEQ ID NO: 4918 - DNA, 25 bp, Artificial Sequence
  Description of Artificial Sequence: Synthetic oligonucleotide
agaattaggtccagagttgaagttc

SEQ ID NO: 4919 - DNA, 25 bp, Artificial Sequence
  Description of Artificial Sequence: Synthetic oligonucleotide
gaattaggtccagagttgaagttcc

SEQ ID NO: 4920 - DNA, 25 bp, Artificial Sequence
  Description of Artificial Sequence: Synthetic oligonucleotide
aattaggtccagagttgaagttccc

SEQ ID NO: 4921 - DNA, 25 bp, Artificial Sequence
  Description of Artificial Sequence: Synthetic oligonucleotide
attaggtccagagttgaagttcccc

SEQ ID NO: 4922 - DNA, 25 bp, Artificial Sequence
  Description of Artificial Sequence: Synthetic oligonucleotide
ttaggtccagagttgaagttcccct

SEQ ID NO: 4923 - DNA, 25 bp, Artificial Sequence
  Description of Artificial Sequence: Synthetic oligonucleotide
taggtccagagttgaagttccccta

SEQ ID NO: 4924 - DNA, 25 bp, Artificial Sequence
  Description of Artificial Sequence: Synthetic oligonucleotide
aggtccagagttgaagttcccctaa

SEQ ID NO: 4925 - DNA, 25 bp, Artificial Sequence
  Description of Artificial Sequence: Synthetic oligonucleotide
ggtccagagttgaagttcccctaat

SEQ ID NO: 4926 - DNA, 25 bp, Artificial Sequence
  Description of Artificial Sequence: Synthetic oligonucleotide
gtccagagttgaagttcccctaatt

SEQ ID NO: 4927 - DNA, 25 bp, Artificial Sequence
  Description of Artificial Sequence: Synthetic oligonucleotide
tccagagttgaagttcccctaattg

SEQ ID NO: 4928 - DNA, 25 bp, Artificial Sequence
  Description of Artificial Sequence: Synthetic oligonucleotide
ccagagttgaagttcccctaattgc

SEQ ID NO: 4929 - DNA, 25 bp, Artificial Sequence
  Description of Artificial Sequence: Synthetic oligonucleotide
cagagttgaagttcccctaattgct

SEQ ID NO: 4930 - DNA, 25 bp, Artificial Sequence
  Description of Artificial Sequence: Synthetic oligonucleotide
agagttgaagttcccctaattgctt

SEQ ID NO: 4931 - DNA, 25 bp, Artificial Sequence
  Description of Artificial Sequence: Synthetic oligonucleotide
gagttgaagttcccctaattgcttc

SEQ ID NO: 4932 - DNA, 25 bp, Artificial Sequence
  Description of Artificial Sequence: Synthetic oligonucleotide
agttgaagttcccctaattgcttcc

SEQ ID NO: 4933 - DNA, 25 bp, Artificial Sequence
  Description of Artificial Sequence: Synthetic oligonucleotide
gttgaagttcccctaattgcttcct

SEQ ID NO: 4934 - DNA, 25 bp, Artificial Sequence
  Description of Artificial Sequence: Synthetic oligonucleotide
ttgaagttcccctaattgcttcctc

SEQ ID NO: 4935 - DNA, 25 bp, Artificial Sequence
  Description of Artificial Sequence: Synthetic oligonucleotide
tgaagttcccctaattgcttcctct

SEQ ID NO: 4936 - DNA, 25 bp, Artificial Sequence
  Description of Artificial Sequence: Synthetic oligonucleotide
gaagttcccctaattgcttcctcta

SEQ ID NO: 4937 - DNA, 25 bp, Artificial Sequence
  Description of Artificial Sequence: Synthetic oligonucleotide
aagttcccctaattgcttcctctac

SEQ ID NO: 4938 - DNA, 25 bp, Artificial Sequence
  Description of Artificial Sequence: Synthetic oligonucleotide
agttcccctaattgcttcctctacc

SEQ ID NO: 4939 - DNA, 25 bp, Artificial Sequence
  Description of Artificial Sequence: Synthetic oligonucleotide
gttcccctaattgcttcctctacca

SEQ ID NO: 4940 - DNA, 25 bp, Artificial Sequence
  Description of Artificial Sequence: Synthetic oligonucleotide
ttcccctaattgcttcctctaccat

SEQ ID NO: 4941 - DNA, 25 bp, Artificial Sequence
  Description of Artificial Sequence: Synthetic oligonucleotide
tcccctaattgcttcctctaccatc

SEQ ID NO: 4942 - DNA, 25 bp, Artificial Sequence
  Description of Artificial Sequence: Synthetic oligonucleotide
cccctaattgcttcctctaccatct

SEQ ID NO: 4943 - DNA, 25 bp, Artificial Sequence
  Description of Artificial Sequence: Synthetic oligonucleotide
ccctaattgcttcctctaccatctg

SEQ ID NO: 4944 - DNA, 25 bp, Artificial Sequence
  Description of Artificial Sequence: Synthetic oligonucleotide
cctaattgcttcctctaccatctgg

SEQ ID NO: 4945 - DNA, 25 bp, Artificial Sequence
  Description of Artificial Sequence: Synthetic oligonucleotide
ctaattgcttcctctaccatctggg

SEQ ID NO: 4946 - DNA, 25 bp, Artificial Sequence
  Description of Artificial Sequence: Synthetic oligonucleotide
taattgcttcctctaccatctggga

SEQ ID NO: 4947 - DNA, 25 bp, Artificial Sequence
  Description of Artificial Sequence: Synthetic oligonucleotide
aattgcttcctctaccatctgggag

SEQ ID NO: 4948 - DNA, 25 bp, Artificial Sequence
  Description of Artificial Sequence: Synthetic oligonucleotide
attgcttcctctaccatctgggaga

SEQ ID NO: 4949 - DNA, 25 bp, Artificial Sequence
  Description of Artificial Sequence: Synthetic oligonucleotide
ttgcttcctctaccatctgggagat

SEQ ID NO: 4950 - DNA, 25 bp, Artificial Sequence
  Description of Artificial Sequence: Synthetic oligonucleotide
tgcttcctctaccatctgggagata

SEQ ID NO: 4951 - DNA, 25 bp, Artificial Sequence
  Description of Artificial Sequence: Synthetic oligonucleotide
gcttcctctaccatctgggagataa

SEQ ID NO: 4952 - DNA, 25 bp, Artificial Sequence
  Description of Artificial Sequence: Synthetic oligonucleotide
cttcctctaccatctgggagataaa

SEQ ID NO: 4953 - DNA, 25 bp, Artificial Sequence
  Description of Artificial Sequence: Synthetic oligonucleotide
ttcctctaccatctgggagataaaa

SEQ ID NO: 4954 - DNA, 25 bp, Artificial Sequence
  Description of Artificial Sequence: Synthetic oligonucleotide
tcctctaccatctgggagataaaat

SEQ ID NO: 4955 - DNA, 25 bp, Artificial Sequence
  Description of Artificial Sequence: Synthetic oligonucleotide
cctctaccatctgggagataaaatt

SEQ ID NO: 4956 - DNA, 25 bp, Artificial Sequence
  Description of Artificial Sequence: Synthetic oligonucleotide
ctctaccatctgggagataaaattg

SEQ ID NO: 4957 - DNA, 25 bp, Artificial Sequence
  Description of Artificial Sequence: Synthetic oligonucleotide
tctaccatctgggagataaaattgt

SEQ ID NO: 4958 - DNA, 25 bp, Artificial Sequence
  Description of Artificial Sequence: Synthetic oligonucleotide
ctaccatctgggagataaaattgtt

SEQ ID NO: 4959 - DNA, 25 bp, Artificial Sequence
  Description of Artificial Sequence: Synthetic oligonucleotide
taccatctgggagataaaattgtta

SEQ ID NO: 4960 - DNA, 25 bp, Artificial Sequence
  Description of Artificial Sequence: Synthetic oligonucleotide
accatctgggagataaaattgttac

SEQ ID NO: 4961 - DNA, 25 bp, Artificial Sequence
  Description of Artificial Sequence: Synthetic oligonucleotide
ccatctgggagataaaattgttacc

SEQ ID NO: 4962 - DNA, 25 bp, Artificial Sequence
  Description of Artificial Sequence: Synthetic oligonucleotide
catctgggagataaaattgttacca

SEQ ID NO: 4963 - DNA, 25 bp, Artificial Sequence
  Description of Artificial Sequence: Synthetic oligonucleotide
atctgggagataaaattgttaccaa

SEQ ID NO: 4964 - DNA, 25 bp, Artificial Sequence
  Description of Artificial Sequence: Synthetic oligonucleotide
tctgggagataaaattgttaccaaa

SEQ ID NO: 4965 - DNA, 25 bp, Artificial Sequence
  Description of Artificial Sequence: Synthetic oligonucleotide
ctgggagataaaattgttaccaaag

SEQ ID NO: 4966 - DNA, 25 bp, Artificial Sequence
  Description of Artificial Sequence: Synthetic oligonucleotide
tgggagataaaattgttaccaaagt

SEQ ID NO: 4967 - DNA, 25 bp, Artificial Sequence
  Description of Artificial Sequence: Synthetic oligonucleotide
gggagataaaattgttaccaaagta

SEQ ID NO: 4968 - DNA, 25 bp, Artificial Sequence
  Description of Artificial Sequence: Synthetic oligonucleotide
ggagataaaattgttaccaaagtaa

SEQ ID NO: 4969 - DNA, 25 bp, Artificial Sequence
  Description of Artificial Sequence: Synthetic oligonucleotide
gagataaaattgttaccaaagtaag

SEQ ID NO: 4970 - DNA, 25 bp, Artificial Sequence
  Description of Artificial Sequence: Synthetic oligonucleotide
agataaaattgttaccaaagtaagt

SEQ ID NO: 4971 - DNA, 25 bp, Artificial Sequence
  Description of Artificial Sequence: Synthetic oligonucleotide
gataaaattgttaccaaagtaagtc

SEQ ID NO: 4972 - DNA, 25 bp, Artificial Sequence
  Description of Artificial Sequence: Synthetic oligonucleotide
ataaaattgttaccaaagtaagtca

SEQ ID NO: 4973 - DNA, 25 bp, Artificial Sequence
  Description of Artificial Sequence: Synthetic oligonucleotide
taaaattgttaccaaagtaagtcaa

SEQ ID NO: 4974 - DNA, 25 bp, Artificial Sequence
  Description of Artificial Sequence: Synthetic oligonucleotide
aaaattgttaccaaagtaagtcaag

SEQ ID NO: 4975 - DNA, 25 bp, Artificial Sequence
  Description of Artificial Sequence: Synthetic oligonucleotide
aaattgttaccaaagtaagtcaaga

SEQ ID NO: 4976 - DNA, 25 bp, Artificial Sequence
  Description of Artificial Sequence: Synthetic oligonucleotide
aattgttaccaaagtaagtcaagaa

SEQ ID NO: 4977 - DNA, 25 bp, Artificial Sequence
  Description of Artificial Sequence: Synthetic oligonucleotide
attgttaccaaagtaagtcaagaac

SEQ ID NO: 4978 - DNA, 25 bp, Artificial Sequence
  Description of Artificial Sequence: Synthetic oligonucleotide
ttgttaccaaagtaagtcaagaacc

SEQ ID NO: 4979 - DNA, 25 bp, Artificial Sequence
  Description of Artificial Sequence: Synthetic oligonucleotide
tgttaccaaagtaagtcaagaacct

SEQ ID NO: 4980 - DNA, 25 bp, Artificial Sequence
  Description of Artificial Sequence: Synthetic oligonucleotide
gttaccaaagtaagtcaagaacctg

SEQ ID NO: 4981 - DNA, 25 bp, Artificial Sequence
  Description of Artificial Sequence: Synthetic oligonucleotide
ttaccaaagtaagtcaagaacctgt

SEQ ID NO: 4982 - DNA, 25 bp, Artificial Sequence
  Description of Artificial Sequence: Synthetic oligonucleotide
taccaaagtaagtcaagaacctgtt

SEQ ID NO: 4983 - DNA, 25 bp, Artificial Sequence
  Description of Artificial Sequence: Synthetic oligonucleotide
accaaagtaagtcaagaacctgttg

SEQ ID NO: 4984 - DNA, 25 bp, Artificial Sequence
  Description of Artificial Sequence: Synthetic oligonucleotide
ccaaagtaagtcaagaacctgttgg

SEQ ID NO: 4985 - DNA, 25 bp, Artificial Sequence
  Description of Artificial Sequence: Synthetic oligonucleotide
caaagtaagtcaagaacctgttggg

SEQ ID NO: 4986 - DNA, 25 bp, Artificial Sequence
  Description of Artificial Sequence: Synthetic oligonucleotide
aaagtaagtcaagaacctgttgggt

SEQ ID NO: 4987 - DNA, 25 bp, Artificial Sequence
  Description of Artificial Sequence: Synthetic oligonucleotide
aagtaagtcaagaacctgttgggtg

SEQ ID NO: 4988 - DNA, 25 bp, Artificial Sequence
  Description of Artificial Sequence: Synthetic oligonucleotide
agtaagtcaagaacctgttgggtgc

SEQ ID NO: 4989 - DNA, 25 bp, Artificial Sequence
  Description of Artificial Sequence: Synthetic oligonucleotide
gtaagtcaagaacctgttgggtgcc

SEQ ID NO: 4990 - DNA, 25 bp, Artificial Sequence
  Description of Artificial Sequence: Synthetic oligonucleotide
taagtcaagaacctgttgggtgccc

SEQ ID NO: 4991 - DNA, 25 bp, Artificial Sequence
  Description of Artificial Sequence: Synthetic oligonucleotide
aagtcaagaacctgttgggtgccct

SEQ ID NO: 4992 - DNA, 25 bp, Artificial Sequence
  Description of Artificial Sequence: Synthetic oligonucleotide
agtcaagaacctgttgggtgcccta

SEQ ID NO: 4993 - DNA, 25 bp, Artificial Sequence
  Description of Artificial Sequence: Synthetic oligonucleotide
gtcaagaacctgttgggtgccctac

SEQ ID NO: 4994 - DNA, 25 bp, Artificial Sequence
  Description of Artificial Sequence: Synthetic oligonucleotide
tcaagaacctgttgggtgccctact

SEQ ID NO: 4995 - DNA, 25 bp, Artificial Sequence
  Description of Artificial Sequence: Synthetic oligonucleotide
caagaacctgttgggtgccctactt

SEQ ID NO: 4996 - DNA, 25 bp, Artificial Sequence
  Description of Artificial Sequence: Synthetic oligonucleotide
aagaacctgttgggtgccctacttc

SEQ ID NO: 4997 - DNA, 25 bp, Artificial Sequence
  Description of Artificial Sequence: Synthetic oligonucleotide
agaacctgttgggtgccctacttct

SEQ ID NO: 4998 - DNA, 25 bp, Artificial Sequence
  Description of Artificial Sequence: Synthetic oligonucleotide
gaacctgttgggtgccctacttcta

SEQ ID NO: 4999 - DNA, 25 bp, Artificial Sequence
  Description of Artificial Sequence: Synthetic oligonucleotide
aacctgttgggtgccctacttctaa

SEQ ID NO: 5000 - DNA, 25 bp, Artificial Sequence
  Description of Artificial Sequence: Synthetic oligonucleotide
acctgttgggtgccctacttctaac

SEQ ID NO: 5001 - DNA, 25 bp, Artificial Sequence
  Description of Artificial Sequence: Synthetic oligonucleotide
cctgttgggtgccctacttctaacc

SEQ ID NO: 5002 - DNA, 25 bp, Artificial Sequence
  Description of Artificial Sequence: Synthetic oligonucleotide
ctgttgggtgccctacttctaacca

SEQ ID NO: 5003 - DNA, 25 bp, Artificial Sequence
  Description of Artificial Sequence: Synthetic oligonucleotide
tgttgggtgccctacttctaaccaa

SEQ ID NO: 5004 - DNA, 25 bp, Artificial Sequence
  Description of Artificial Sequence: Synthetic oligonucleotide
gttgggtgccctacttctaaccaaa

SEQ ID NO: 5005 - DNA, 25 bp, Artificial Sequence
  Description of Artificial Sequence: Synthetic oligonucleotide
ttgggtgccctacttctaaccaaat

SEQ ID NO: 5006 - DNA, 25 bp, Artificial Sequence
  Description of Artificial Sequence: Synthetic oligonucleotide
tgggtgccctacttctaaccaaatg

SEQ ID NO: 5007 - DNA, 25 bp, Artificial Sequence
  Description of Artificial Sequence: Synthetic oligonucleotide
gggtgccctacttctaaccaaatga

SEQ ID NO: 5008 - DNA, 25 bp, Artificial Sequence
  Description of Artificial Sequence: Synthetic oligonucleotide
ggtgccctacttctaaccaaatgag

SEQ ID NO: 5009 - DNA, 25 bp, Artificial Sequence
  Description of Artificial Sequence: Synthetic oligonucleotide
gtgccctacttctaaccaaatgaga

SEQ ID NO: 5010 - DNA, 25 bp, Artificial Sequence
  Description of Artificial Sequence: Synthetic oligonucleotide
tgccctacttctaaccaaatgagac

SEQ ID NO: 5011 - DNA, 25 bp, Artificial Sequence
  Description of Artificial Sequence: Synthetic oligonucleotide
gccctacttctaaccaaatgagact

SEQ ID NO: 5012 - DNA, 25 bp, Artificial Sequence
  Description of Artificial Sequence: Synthetic oligonucleotide
ccctacttctaaccaaatgagactt

SEQ ID NO: 5013 - DNA, 25 bp, Artificial Sequence
  Description of Artificial Sequence: Synthetic oligonucleotide
cctacttctaaccaaatgagacttc

SEQ ID NO: 5014 - DNA, 25 bp, Artificial Sequence
  Description of Artificial Sequence: Synthetic oligonucleotide
ctacttctaaccaaatgagacttct

SEQ ID NO: 5015 - DNA, 25 bp, Artificial Sequence
  Description of Artificial Sequence: Synthetic oligonucleotide
tctttcaatatgttttcattaactc

SEQ ID NO: 5016 - DNA, 25 bp, Artificial Sequence
  Description of Artificial Sequence: Synthetic oligonucleotide
ctttcaatatgttttcattaactct

SEQ ID NO: 5017 - DNA, 25 bp, Artificial Sequence
  Description of Artificial Sequence: Synthetic oligonucleotide
tttcaatatgttttcattaactctg

SEQ ID NO: 5018 - DNA, 25 bp, Artificial Sequence
  Description of Artificial Sequence: Synthetic oligonucleotide
ttcaatatgttttcattaactctgt

SEQ ID NO: 5019 - DNA, 25 bp, Artificial Sequence
  Description of Artificial Sequence: Synthetic oligonucleotide
tcaatatgttttcattaactctgtg

SEQ ID NO: 5020 - DNA, 25 bp, Artificial Sequence
  Description of Artificial Sequence: Synthetic oligonucleotide
caatatgttttcattaactctgtga

SEQ ID NO: 5021 - DNA, 25 bp, Artificial Sequence
  Description of Artificial Sequence: Synthetic oligonucleotide
aatatgttttcattaactctgtgac

SEQ ID NO: 5022 - DNA, 25 bp, Artificial Sequence
  Description of Artificial Sequence: Synthetic oligonucleotide
atatgttttcattaactctgtgacc

SEQ ID NO: 5023 - DNA, 25 bp, Artificial Sequence
  Description of Artificial Sequence: Synthetic oligonucleotide
tatgttttcattaactctgtgacct

SEQ ID NO: 5024 - DNA, 25 bp, Artificial Sequence
  Description of Artificial Sequence: Synthetic oligonucleotide
atgttttcattaactctgtgacctg

SEQ ID NO: 5025 - DNA, 25 bp, Artificial Sequence
  Description of Artificial Sequence: Synthetic oligonucleotide
tgttttcattaactctgtgacctga

SEQ ID NO: 5026 - DNA, 25 bp, Artificial Sequence
  Description of Artificial Sequence: Synthetic oligonucleotide
gttttcattaactctgtgacctgaa

SEQ ID NO: 5027 - DNA, 25 bp, Artificial Sequence
  Description of Artificial Sequence: Synthetic oligonucleotide
ttttcattaactctgtgacctgaag

SEQ ID NO: 5028 - DNA, 25 bp, Artificial Sequence
  Description of Artificial Sequence: Synthetic oligonucleotide
tttcattaactctgtgacctgaagg

SEQ ID NO: 5029 - DNA, 25 bp, Artificial Sequence
  Description of Artificial Sequence: Synthetic oligonucleotide
ttcattaactctgtgacctgaaggg

SEQ ID NO: 5030 - DNA, 25 bp, Artificial Sequence
  Description of Artificial Sequence: Synthetic oligonucleotide
tcattaactctgtgacctgaaggga

SEQ ID NO: 5031 - DNA, 25 bp, Artificial Sequence
  Description of Artificial Sequence: Synthetic oligonucleotide
cattaactctgtgacctgaagggaa

SEQ ID NO: 5032 - DNA, 25 bp, Artificial Sequence
  Description of Artificial Sequence: Synthetic oligonucleotide
attaactctgtgacctgaagggaaa

SEQ ID NO: 5033 - DNA, 25 bp, Artificial Sequence
  Description of Artificial Sequence: Synthetic oligonucleotide
ttaactctgtgacctgaagggaaaa

SEQ ID NO: 5034 - DNA, 25 bp, Artificial Sequence
  Description of Artificial Sequence: Synthetic oligonucleotide
taactctgtgacctgaagggaaaac

SEQ ID NO: 5035 - DNA, 25 bp, Artificial Sequence
  Description of Artificial Sequence: Synthetic oligonucleotide
aactctgtgacctgaagggaaaaca

SEQ ID NO: 5036 - DNA, 25 bp, Artificial Sequence
  Description of Artificial Sequence: Synthetic oligonucleotide
actctgtgacctgaagggaaaacag

SEQ ID NO: 5037 - DNA, 25 bp, Artificial Sequence
  Description of Artificial Sequence: Synthetic oligonucleotide
ctctgtgacctgaagggaaaacagt

SEQ ID NO: 5038 - DNA, 25 bp, Artificial Sequence
  Description of Artificial Sequence: Synthetic oligonucleotide
tctgtgacctgaagggaaaacagtt

SEQ ID NO: 5039 - DNA, 25 bp, Artificial Sequence
  Description of Artificial Sequence: Synthetic oligonucleotide
ctgtgacctgaagggaaaacagttt

SEQ ID NO: 5040 - DNA, 25 bp, Artificial Sequence
  Description of Artificial Sequence: Synthetic oligonucleotide
tgtgacctgaagggaaaacagttta

SEQ ID NO: 5041 - DNA, 25 bp, Artificial Sequence
  Description of Artificial Sequence: Synthetic oligonucleotide
gtgacctgaagggaaaacagtttac

SEQ ID NO: 5042 - DNA, 25 bp, Artificial Sequence
  Description of Artificial Sequence: Synthetic oligonucleotide
tgacctgaagggaaaacagtttacc

SEQ ID NO: 5043 - DNA, 25 bp, Artificial Sequence
  Description of Artificial Sequence: Synthetic oligonucleotide
gacctgaagggaaaacagtttacct

SEQ ID NO: 5044 - DNA, 25 bp, Artificial Sequence
  Description of Artificial Sequence: Synthetic oligonucleotide
acctgaagggaaaacagtttacctt

SEQ ID NO: 5045 - DNA, 25 bp, Artificial Sequence
  Description of Artificial Sequence: Synthetic oligonucleotide
cctgaagggaaaacagtttaccttt

SEQ ID NO: 5046 - DNA, 25 bp, Artificial Sequence
  Description of Artificial Sequence: Synthetic oligonucleotide
ctgaagggaaaacagtttaccttta

SEQ ID NO: 5047 - DNA, 25 bp, Artificial Sequence
  Description of Artificial Sequence: Synthetic oligonucleotide
tgaagggaaaacagtttacctttaa

SEQ ID NO: 5048 - DNA, 25 bp, Artificial Sequence
  Description of Artificial Sequence: Synthetic oligonucleotide
gaagggaaaacagtttacctttaaa

SEQ ID NO: 5049 - DNA, 25 bp, Artificial Sequence
  Description of Artificial Sequence: Synthetic oligonucleotide
aagggaaaacagtttacctttaaag

SEQ ID NO: 5050 - DNA, 25 bp, Artificial Sequence
  Description of Artificial Sequence: Synthetic oligonucleotide
agggaaaacagtttacctttaaagc

SEQ ID NO: 5051 - DNA, 25 bp, Artificial Sequence
  Description of Artificial Sequence: Synthetic oligonucleotide
gggaaaacagtttacctttaaagct

SEQ ID NO: 5052 - DNA, 25 bp, Artificial Sequence
  Description of Artificial Sequence: Synthetic oligonucleotide
ggaaaacagtttacctttaaagctc

SEQ ID NO: 5053 - DNA, 25 bp, Artificial Sequence
  Description of Artificial Sequence: Synthetic oligonucleotide
gaaaacagtttacctttaaagctct

SEQ ID NO: 5054 - DNA, 25 bp, Artificial Sequence
  Description of Artificial Sequence: Synthetic oligonucleotide
aaaacagtttacctttaaagctctc

SEQ ID NO: 5055 - DNA, 25 bp, Artificial Sequence
  Description of Artificial Sequence: Synthetic oligonucleotide
aaacagtttacctttaaagctctct

SEQ ID NO: 5056 - DNA, 25 bp, Artificial Sequence
  Description of Artificial Sequence: Synthetic oligonucleotide
aacagtttacctttaaagctctctg

SEQ ID NO: 5057 - DNA, 25 bp, Artificial Sequence
  Description of Artificial Sequence: Synthetic oligonucleotide
acagtttacctttaaagctctctga

SEQ ID NO: 5058 - DNA, 25 bp, Artificial Sequence
  Description of Artificial Sequence: Synthetic oligonucleotide
cagtttacctttaaagctctctgaa

SEQ ID NO: 5059 - DNA, 25 bp, Artificial Sequence
  Description of Artificial Sequence: Synthetic oligonucleotide
agtttacctttaaagctctctgaac

SEQ ID NO: 5060 - DNA, 25 bp, Artificial Sequence
  Description of Artificial Sequence: Synthetic oligonucleotide
gtttacctttaaagctctctgaact

SEQ ID NO: 5061 - DNA, 25 bp, Artificial Sequence
  Description of Artificial Sequence: Synthetic oligonucleotide
tttacctttaaagctctctgaactg

SEQ ID NO: 5062 - DNA, 25 bp, Artificial Sequence
  Description of Artificial Sequence: Synthetic oligonucleotide
ttacctttaaagctctctgaactgc

SEQ ID NO: 5063 - DNA, 25 bp, Artificial Sequence
  Description of Artificial Sequence: Synthetic oligonucleotide
tacctttaaagctctctgaactgca

SEQ ID NO: 5064 - DNA, 25 bp, Artificial Sequence
  Description of Artificial Sequence: Synthetic oligonucleotide
acctttaaagctctctgaactgcag

SEQ ID NO: 5065 - DNA, 25 bp, Artificial Sequence
  Description of Artificial Sequence: Synthetic oligonucleotide
cctttaaagctctctgaactgcagt

SEQ ID NO: 5066 - DNA, 25 bp, Artificial Sequence
  Description of Artificial Sequence: Synthetic oligonucleotide
ctttaaagctctctgaactgcagtc

SEQ ID NO: 5067 - DNA, 25 bp, Artificial Sequence
  Description of Artificial Sequence: Synthetic oligonucleotide
tttaaagctctctgaactgcagtct

SEQ ID NO: 5068 - DNA, 25 bp, Artificial Sequence
  Description of Artificial Sequence: Synthetic oligonucleotide
ttaaagctctctgaactgcagtctt

SEQ ID NO: 5069 - DNA, 25 bp, Artificial Sequence
  Description of Artificial Sequence: Synthetic oligonucleotide
taaagctctctgaactgcagtcttc

SEQ ID NO: 5070 - DNA, 25 bp, Artificial Sequence
  Description of Artificial Sequence: Synthetic oligonucleotide
aaagctctctgaactgcagtcttct

SEQ ID NO: 5071 - DNA, 25 bp, Artificial Sequence
  Description of Artificial Sequence: Synthetic oligonucleotide
aagctctctgaactgcagtcttctt

SEQ ID NO: 5072 - DNA, 25 bp, Artificial Sequence
  Description of Artificial Sequence: Synthetic oligonucleotide
agctctctgaactgcagtcttcttc

SEQ ID NO: 5073 - DNA, 25 bp, Artificial Sequence
  Description of Artificial Sequence: Synthetic oligonucleotide
gctctctgaactgcagtcttcttca

SEQ ID NO: 5074 - DNA, 25 bp, Artificial Sequence
  Description of Artificial Sequence: Synthetic oligonucleotide
ctctctgaactgcagtcttcttcaa

SEQ ID NO: 5075 - DNA, 25 bp, Artificial Sequence
  Description of Artificial Sequence: Synthetic oligonucleotide
tctctgaactgcagtcttcttcaag

SEQ ID NO: 5076 - DNA, 25 bp, Artificial Sequence
  Description of Artificial Sequence: Synthetic oligonucleotide
ctctgaactgcagtcttcttcaaga

SEQ ID NO: 5077 - DNA, 25 bp, Artificial Sequence
  Description of Artificial Sequence: Synthetic oligonucleotide
tctgaactgcagtcttcttcaagac

SEQ ID NO: 5078 - DNA, 25 bp, Artificial Sequence
  Description of Artificial Sequence: Synthetic oligonucleotide
ctgaactgcagtcttcttcaagaca

SEQ ID NO: 5079 - DNA, 25 bp, Artificial Sequence
  Description of Artificial Sequence: Synthetic oligonucleotide
tgaactgcagtcttcttcaagacat

SEQ ID NO: 5080 - DNA, 25 bp, Artificial Sequence
  Description of Artificial Sequence: Synthetic oligonucleotide
gaactgcagtcttcttcaagacatc

SEQ ID NO: 5081 - DNA, 25 bp, Artificial Sequence
  Description of Artificial Sequence: Synthetic oligonucleotide
aactgcagtcttcttcaagacatcg

SEQ ID NO: 5082 - DNA, 25 bp, Artificial Sequence
  Description of Artificial Sequence: Synthetic oligonucleotide
actgcagtcttcttcaagacatcgg

SEQ ID NO: 5083 - DNA, 25 bp, Artificial Sequence
  Description of Artificial Sequence: Synthetic oligonucleotide
ctgcagtcttcttcaagacatcggg

SEQ ID NO: 5084 - DNA, 25 bp, Artificial Sequence
  Description of Artificial Sequence: Synthetic oligonucleotide
tgcagtcttcttcaagacatcgggg

SEQ ID NO: 5085 - DNA, 25 bp, Artificial Sequence
  Description of Artificial Sequence: Synthetic oligonucleotide
gcagtcttcttcaagacatcggggt

SEQ ID NO: 5086 - DNA, 25 bp, Artificial Sequence
  Description of Artificial Sequence: Synthetic oligonucleotide
cagtcttcttcaagacatcggggtt

SEQ ID NO: 5087 - DNA, 25 bp, Artificial Sequence
  Description of Artificial Sequence: Synthetic oligonucleotide
agtcttcttcaagacatcggggtta

SEQ ID NO: 5088 - DNA, 25 bp, Artificial Sequence
  Description of Artificial Sequence: Synthetic oligonucleotide
gtcttcttcaagacatcggggttaa

SEQ ID NO: 5089 - DNA, 25 bp, Artificial Sequence
  Description of Artificial Sequence: Synthetic oligonucleotide
tcttcttcaagacatcggggttaaa

SEQ ID NO: 5090 - DNA, 25 bp, Artificial Sequence
  Description of Artificial Sequence: Synthetic oligonucleotide
cttcttcaagacatcggggttaaat

SEQ ID NO: 5091 - DNA, 25 bp, Artificial Sequence
  Description of Artificial Sequence: Synthetic oligonucleotide
ttcttcaagacatcggggttaaatt

SEQ ID NO: 5092 - DNA, 25 bp, Artificial Sequence
  Description of Artificial Sequence: Synthetic oligonucleotide
tcttcaagacatcggggttaaattc

SEQ ID NO: 5093 - DNA, 25 bp, Artificial Sequence
  Description of Artificial Sequence: Synthetic oligonucleotide
cttcaagacatcggggttaaattct

SEQ ID NO: 5094 - DNA, 25 bp, Artificial Sequence
  Description of Artificial Sequence: Synthetic oligonucleotide
ttcaagacatcggggttaaattcta

SEQ ID NO: 5095 - DNA, 25 bp, Artificial Sequence
  Description of Artificial Sequence: Synthetic oligonucleotide
tcaagacatcggggttaaattctaa

SEQ ID NO: 5096 - DNA, 25 bp, Artificial Sequence
  Description of Artificial Sequence: Synthetic oligonucleotide
caagacatcggggttaaattctaat

SEQ ID NO: 5097 - DNA, 25 bp, Artificial Sequence
  Description of Artificial Sequence: Synthetic oligonucleotide
aagacatcggggttaaattctaatg

SEQ ID NO: 5098 - DNA, 25 bp, Artificial Sequence
  Description of Artificial Sequence: Synthetic oligonucleotide
agacatcggggttaaattctaatgg

SEQ ID NO: 5099 - DNA, 25 bp, Artificial Sequence
  Description of Artificial Sequence: Synthetic oligonucleotide
gacatcggggttaaattctaatggg

SEQ ID NO: 5100 - DNA, 25 bp, Artificial Sequence
  Description of Artificial Sequence: Synthetic oligonucleotide
acatcggggttaaattctaatgggt

SEQ ID NO: 5101 - DNA, 25 bp, Artificial Sequence
  Description of Artificial Sequence: Synthetic oligonucleotide
catcggggttaaattctaatgggtt

SEQ ID NO: 5102 - DNA, 25 bp, Artificial Sequence
  Description of Artificial Sequence: Synthetic oligonucleotide
atcggggttaaattctaatgggtta

SEQ ID NO: 5103 - DNA, 25 bp, Artificial Sequence
  Description of Artificial Sequence: Synthetic oligonucleotide
tcggggttaaattctaatgggttac

SEQ ID NO: 5104 - DNA, 25 bp, Artificial Sequence
  Description of Artificial Sequence: Synthetic oligonucleotide
cggggttaaattctaatgggttact

SEQ ID NO: 5105 - DNA, 25 bp, Artificial Sequence
  Description of Artificial Sequence: Synthetic oligonucleotide
ggggttaaattctaatgggttactc

SEQ ID NO: 5106 - DNA, 25 bp, Artificial Sequence
  Description of Artificial Sequence: Synthetic oligonucleotide
gggttaaattctaatgggttactct

SEQ ID NO: 5107 - DNA, 25 bp, Artificial Sequence
  Description of Artificial Sequence: Synthetic oligonucleotide
ggttaaattctaatgggttactctt

SEQ ID NO: 5108 - DNA, 25 bp, Artificial Sequence
  Description of Artificial Sequence: Synthetic oligonucleotide
gttaaattctaatgggttactcttt

SEQ ID NO: 5109 - DNA, 25 bp, Artificial Sequence
  Description of Artificial Sequence: Synthetic oligonucleotide
ttaaattctaatgggttactctttc

SEQ ID NO: 5110 - DNA, 25 bp, Artificial Sequence
  Description of Artificial Sequence: Synthetic oligonucleotide
taaattctaatgggttactctttca

SEQ ID NO: 5111 - DNA, 25 bp, Artificial Sequence
  Description of Artificial Sequence: Synthetic oligonucleotide
aaattctaatgggttactctttcaa

SEQ ID NO: 5112 - DNA, 25 bp, Artificial Sequence
  Description of Artificial Sequence: Synthetic oligonucleotide
aattctaatgggttactctttcaag

SEQ ID NO: 5113 - DNA, 25 bp, Artificial Sequence
  Description of Artificial Sequence: Synthetic oligonucleotide
attctaatgggttactctttcaagt

SEQ ID NO: 5114 - DNA, 25 bp, Artificial Sequence
  Description of Artificial Sequence: Synthetic oligonucleotide
ttctaatgggttactctttcaagtc

SEQ ID NO: 5115 - DNA, 25 bp, Artificial Sequence
  Description of Artificial Sequence: Synthetic oligonucleotide
tctaatgggttactctttcaagtca

SEQ ID NO: 5116 - DNA, 25 bp, Artificial Sequence
  Description of Artificial Sequence: Synthetic oligonucleotide
ctaatgggttactctttcaagtcag

SEQ ID NO: 5117 - DNA, 25 bp, Artificial Sequence
  Description of Artificial Sequence: Synthetic oligonucleotide
taatgggttactctttcaagtcaga

SEQ ID NO: 5118 - DNA, 25 bp, Artificial Sequence
  Description of Artificial Sequence: Synthetic oligonucleotide
aatgggttactctttcaagtcagaa

SEQ ID NO: 5119 - DNA, 25 bp, Artificial Sequence
  Description of Artificial Sequence: Synthetic oligonucleotide
atgggttactctttcaagtcagaag

SEQ ID NO: 5120 - DNA, 25 bp, Artificial Sequence
  Description of Artificial Sequence: Synthetic oligonucleotide
tgggttactctttcaagtcagaaga

SEQ ID NO: 5121 - DNA, 25 bp, Artificial Sequence
  Description of Artificial Sequence: Synthetic oligonucleotide
gggttactctttcaagtcagaagaa

SEQ ID NO: 5122 - DNA, 25 bp, Artificial Sequence
  Description of Artificial Sequence: Synthetic oligonucleotide
ggttactctttcaagtcagaagaaa

SEQ ID NO: 5123 - DNA, 25 bp, Artificial Sequence
  Description of Artificial Sequence: Synthetic oligonucleotide
gttactctttcaagtcagaagaaaa

SEQ ID NO: 5124 - DNA, 25 bp, Artificial Sequence
  Description of Artificial Sequence: Synthetic oligonucleotide
ttactctttcaagtcagaagaaaac

SEQ ID NO: 5125 - DNA, 25 bp, Artificial Sequence
  Description of Artificial Sequence: Synthetic oligonucleotide
tactctttcaagtcagaagaaaacg

SEQ ID NO: 5126 - DNA, 25 bp, Artificial Sequence
  Description of Artificial Sequence: Synthetic oligonucleotide
actctttcaagtcagaagaaaacga

SEQ ID NO: 5127 - DNA, 25 bp, Artificial Sequence
  Description of Artificial Sequence: Synthetic oligonucleotide
ctctttcaagtcagaagaaaacgaa

SEQ ID NO: 5128 - DNA, 25 bp, Artificial Sequence
  Description of Artificial Sequence: Synthetic oligonucleotide
tctttcaagtcagaagaaaacgaat

SEQ ID NO: 5129 - DNA, 25 bp, Artificial Sequence
  Description of Artificial Sequence: Synthetic oligonucleotide
ctttcaagtcagaagaaaacgaata

SEQ ID NO: 5130 - DNA, 25 bp, Artificial Sequence
  Description of Artificial Sequence: Synthetic oligonucleotide
tttcaagtcagaagaaaacgaatat

SEQ ID NO: 5131 - DNA, 25 bp, Artificial Sequence
  Description of Artificial Sequence: Synthetic oligonucleotide
ttcaagtcagaagaaaacgaatatg

SEQ ID NO: 5132 - DNA, 25 bp, Artificial Sequence
  Description of Artificial Sequence: Synthetic oligonucleotide
tcaagtcagaagaaaacgaatatgc

SEQ ID NO: 5133 - DNA, 25 bp, Artificial Sequence
  Description of Artificial Sequence: Synthetic oligonucleotide
caagtcagaagaaaacgaatatgcc

SEQ ID NO: 5134 - DNA, 25 bp, Artificial Sequence
  Description of Artificial Sequence: Synthetic oligonucleotide
aagtcagaagaaaacgaatatgcca

SEQ ID NO: 5135 - DNA, 25 bp, Artificial Sequence
  Description of Artificial Sequence: Synthetic oligonucleotide
agtcagaagaaaacgaatatgccaa

SEQ ID NO: 5136 - DNA, 25 bp, Artificial Sequence
  Description of Artificial Sequence: Synthetic oligonucleotide
gtcagaagaaaacgaatatgccaag

SEQ ID NO: 5137 - DNA, 25 bp, Artificial Sequence
  Description of Artificial Sequence: Synthetic oligonucleotide
tcagaagaaaacgaatatgccaagg

SEQ ID NO: 5138 - DNA, 25 bp, Artificial Sequence
  Description of Artificial Sequence: Synthetic oligonucleotide
cagaagaaaacgaatatgccaaggg

SEQ ID NO: 5139 - DNA, 25 bp, Artificial Sequence
  Description of Artificial Sequence: Synthetic oligonucleotide
agaagaaaacgaatatgccaagggt

SEQ ID NO: 5140 - DNA, 25 bp, Artificial Sequence
  Description of Artificial Sequence: Synthetic oligonucleotide
gaagaaaacgaatatgccaagggtt

SEQ ID NO: 5141 - DNA, 25 bp, Artificial Sequence
  Description of Artificial Sequence: Synthetic oligonucleotide
aagaaaacgaatatgccaagggtta

SEQ ID NO: 5142 - DNA, 25 bp, Artificial Sequence
  Description of Artificial Sequence: Synthetic oligonucleotide
agaaaacgaatatgccaagggttaa

SEQ ID NO: 5143 - DNA, 25 bp, Artificial Sequence
  Description of Artificial Sequence: Synthetic oligonucleotide
gaaaacgaatatgccaagggttaat

SEQ ID NO: 5144 - DNA, 25 bp, Artificial Sequence
  Description of Artificial Sequence: Synthetic oligonucleotide
aaaacgaatatgccaagggttaata

SEQ ID NO: 5145 - DNA, 25 bp, Artificial Sequence
  Description of Artificial Sequence: Synthetic oligonucleotide
aaacgaatatgccaagggttaataa

SEQ ID NO: 5146 - DNA, 25 bp, Artificial Sequence
  Description of Artificial Sequence: Synthetic oligonucleotide
aacgaatatgccaagggttaataaa

SEQ ID NO: 5147 - DNA, 25 bp, Artificial Sequence
  Description of Artificial Sequence: Synthetic oligonucleotide
acgaatatgccaagggttaataaaa

SEQ ID NO: 5148 - DNA, 25 bp, Artificial Sequence
  Description of Artificial Sequence: Synthetic oligonucleotide
cgaatatgccaagggttaataaaac

SEQ ID NO: 5149 - DNA, 25 bp, Artificial Sequence
  Description of Artificial Sequence: Synthetic oligonucleotide
gaatatgccaagggttaataaaaca

SEQ ID NO: 5150 - DNA, 25 bp, Artificial Sequence
  Description of Artificial Sequence: Synthetic oligonucleotide
aatatgccaagggttaataaaacat

SEQ ID NO: 5151 - DNA, 25 bp, Artificial Sequence
  Description of Artificial Sequence: Synthetic oligonucleotide
atatgccaagggttaataaaacatg

SEQ ID NO: 5152 - DNA, 25 bp, Artificial Sequence
  Description of Artificial Sequence: Synthetic oligonucleotide
tatgccaagggttaataaaacatgc

SEQ ID NO: 5153 - DNA, 25 bp, Artificial Sequence
  Description of Artificial Sequence: Synthetic oligonucleotide
atgccaagggttaataaaacatgca

SEQ ID NO: 5154 - DNA, 25 bp, Artificial Sequence
  Description of Artificial Sequence: Synthetic oligonucleotide
tgccaagggttaataaaacatgcaa

SEQ ID NO: 5155 - DNA, 25 bp, Artificial Sequence
  Description of Artificial Sequence: Synthetic oligonucleotide
tggcccagagggcaggaacaggtgg

SEQ ID NO: 5156 - DNA, 25 bp, Artificial Sequence
  Description of Artificial Sequence: Synthetic oligonucleotide
ggcccagagggcaggaacaggtgga

SEQ ID NO: 5157 - DNA, 25 bp, Artificial Sequence
  Description of Artificial Sequence: Synthetic oligonucleotide
gcccagagggcaggaacaggtggac

SEQ ID NO: 5158 - DNA, 25 bp, Artificial Sequence
  Description of Artificial Sequence: Synthetic oligonucleotide
cccagagggcaggaacaggtggacg

SEQ ID NO: 5159 - DNA, 25 bp, Artificial Sequence
  Description of Artificial Sequence: Synthetic oligonucleotide
ccagagggcaggaacaggtggacga

SEQ ID NO: 5160 - DNA, 25 bp, Artificial Sequence
  Description of Artificial Sequence: Synthetic oligonucleotide
cagagggcaggaacaggtggacgaa

SEQ ID NO: 5161 - DNA, 25 bp, Artificial Sequence
  Description of Artificial Sequence: Synthetic oligonucleotide
agagggcaggaacaggtggacgaac

SEQ ID NO: 5162 - DNA, 25 bp, Artificial Sequence
  Description of Artificial Sequence: Synthetic oligonucleotide
gagggcaggaacaggtggacgaaca

SEQ ID NO: 5163 - DNA, 25 bp, Artificial Sequence
  Description of Artificial Sequence: Synthetic oligonucleotide
agggcaggaacaggtggacgaacaa

SEQ ID NO: 5164 - DNA, 25 bp, Artificial Sequence
  Description of Artificial Sequence: Synthetic oligonucleotide
gggcaggaacaggtggacgaacaac

SEQ ID NO: 5165 - DNA, 25 bp, Artificial Sequence
  Description of Artificial Sequence: Synthetic oligonucleotide
ggcaggaacaggtggacgaacaacc

SEQ ID NO: 5166 - DNA, 25 bp, Artificial Sequence
  Description of Artificial Sequence: Synthetic oligonucleotide
gcaggaacaggtggacgaacaacca

SEQ ID NO: 5167 - DNA, 25 bp, Artificial Sequence
  Description of Artificial Sequence: Synthetic oligonucleotide
caggaacaggtggacgaacaaccag

SEQ ID NO: 5168 - DNA, 25 bp, Artificial Sequence
  Description of Artificial Sequence: Synthetic oligonucleotide
aggaacaggtggacgaacaaccaga

SEQ ID NO: 5169 - DNA, 25 bp, Artificial Sequence
  Description of Artificial Sequence: Synthetic oligonucleotide
ggaacaggtggacgaacaaccagat

SEQ ID NO: 5170 - DNA, 25 bp, Artificial Sequence
  Description of Artificial Sequence: Synthetic oligonucleotide
gaacaggtggacgaacaaccagatg

SEQ ID NO: 5171 - DNA, 25 bp, Artificial Sequence
  Description of Artificial Sequence: Synthetic oligonucleotide
aacaggtggacgaacaaccagatga

SEQ ID NO: 5172 - DNA, 25 bp, Artificial Sequence
  Description of Artificial Sequence: Synthetic oligonucleotide
acaggtggacgaacaaccagatgag

SEQ ID NO: 5173 - DNA, 25 bp, Artificial Sequence
  Description of Artificial Sequence: Synthetic oligonucleotide
caggtggacgaacaaccagatgaga

SEQ ID NO: 5174 - DNA, 25 bp, Artificial Sequence
  Description of Artificial Sequence: Synthetic oligonucleotide
aggtggacgaacaaccagatgagag

SEQ ID NO: 5175 - DNA, 25 bp, Artificial Sequence
  Description of Artificial Sequence: Synthetic oligonucleotide
ggtggacgaacaaccagatgagaga

SEQ ID NO: 5176 - DNA, 25 bp, Artificial Sequence
  Description of Artificial Sequence: Synthetic oligonucleotide
gtggacgaacaaccagatgagagaa

SEQ ID NO: 5177 - DNA, 25 bp, Artificial Sequence
  Description of Artificial Sequence: Synthetic oligonucleotide
tggacgaacaaccagatgagagaac

SEQ ID NO: 5178 - DNA, 25 bp, Artificial Sequence
  Description of Artificial Sequence: Synthetic oligonucleotide
ggacgaacaaccagatgagagaacg

SEQ ID NO: 5179 - DNA, 25 bp, Artificial Sequence
  Description of Artificial Sequence: Synthetic oligonucleotide
gacgaacaaccagatgagagaacgt

SEQ ID NO: 5180 - DNA, 25 bp, Artificial Sequence
  Description of Artificial Sequence: Synthetic oligonucleotide
acgaacaaccagatgagagaacgta

SEQ ID NO: 5181 - DNA, 25 bp, Artificial Sequence
  Description of Artificial Sequence: Synthetic oligonucleotide
cgaacaaccagatgagagaacgtac

SEQ ID NO: 5182 - DNA, 25 bp, Artificial Sequence
  Description of Artificial Sequence: Synthetic oligonucleotide
gaacaaccagatgagagaacgtacc

SEQ ID NO: 5183 - DNA, 25 bp, Artificial Sequence
  Description of Artificial Sequence: Synthetic oligonucleotide
aacaaccagatgagagaacgtacca

SEQ ID NO: 5184 - DNA, 25 bp, Artificial Sequence
  Description of Artificial Sequence: Synthetic oligonucleotide
acaaccagatgagagaacgtaccag

SEQ ID NO: 5185 - DNA, 25 bp, Artificial Sequence
  Description of Artificial Sequence: Synthetic oligonucleotide
caaccagatgagagaacgtaccagg

SEQ ID NO: 5186 - DNA, 25 bp, Artificial Sequence
  Description of Artificial Sequence: Synthetic oligonucleotide
aaccagatgagagaacgtaccaggc

SEQ ID NO: 5187 - DNA, 25 bp, Artificial Sequence
  Description of Artificial Sequence: Synthetic oligonucleotide
accagatgagagaacgtaccaggca

SEQ ID NO: 5188 - DNA, 25 bp, Artificial Sequence
  Description of Artificial Sequence: Synthetic oligonucleotide
ccagatgagagaacgtaccaggcat

SEQ ID NO: 5189 - DNA, 25 bp, Artificial Sequence
  Description of Artificial Sequence: Synthetic oligonucleotide
cagatgagagaacgtaccaggcatg

SEQ ID NO: 5190 - DNA, 25 bp, Artificial Sequence
  Description of Artificial Sequence: Synthetic oligonucleotide
agatgagagaacgtaccaggcatgc

SEQ ID NO: 5191 - DNA, 25 bp, Artificial Sequence
  Description of Artificial Sequence: Synthetic oligonucleotide
gatgagagaacgtaccaggcatgca

SEQ ID NO: 5192 - DNA, 25 bp, Artificial Sequence
  Description of Artificial Sequence: Synthetic oligonucleotide
atgagagaacgtaccaggcatgcaa

SEQ ID NO: 5193 - DNA, 25 bp, Artificial Sequence
  Description of Artificial Sequence: Synthetic oligonucleotide
tgagagaacgtaccaggcatgcaag

SEQ ID NO: 5194 - DNA, 25 bp, Artificial Sequence
  Description of Artificial Sequence: Synthetic oligonucleotide
gagagaacgtaccaggcatgcaagc

SEQ ID NO: 5195 - DNA, 25 bp, Artificial Sequence
  Description of Artificial Sequence: Synthetic oligonucleotide
agagaacgtaccaggcatgcaagct

SEQ ID NO: 5196 - DNA, 25 bp, Artificial Sequence
  Description of Artificial Sequence: Synthetic oligonucleotide
gagaacgtaccaggcatgcaagcta

SEQ ID NO: 5197 - DNA, 25 bp, Artificial Sequence
  Description of Artificial Sequence: Synthetic oligonucleotide
agaacgtaccaggcatgcaagctag

SEQ ID NO: 5198 - DNA, 25 bp, Artificial Sequence
  Description of Artificial Sequence: Synthetic oligonucleotide
gaacgtaccaggcatgcaagctaga

SEQ ID NO: 5199 - DNA, 25 bp, Artificial Sequence
  Description of Artificial Sequence: Synthetic oligonucleotide
aacgtaccaggcatgcaagctagac

SEQ ID NO: 5200 - DNA, 25 bp, Artificial Sequence
  Description of Artificial Sequence: Synthetic oligonucleotide
acgtaccaggcatgcaagctagacc

SEQ ID NO: 5201 - DNA, 25 bp, Artificial Sequence
  Description of Artificial Sequence: Synthetic oligonucleotide
cgtaccaggcatgcaagctagaccc

SEQ ID NO: 5202 - DNA, 25 bp, Artificial Sequence
  Description of Artificial Sequence: Synthetic oligonucleotide
gtaccaggcatgcaagctagaccca

SEQ ID NO: 5203 - DNA, 25 bp, Artificial Sequence
  Description of Artificial Sequence: Synthetic oligonucleotide
taccaggcatgcaagctagacccag

SEQ ID NO: 5204 - DNA, 25 bp, Artificial Sequence
  Description of Artificial Sequence: Synthetic oligonucleotide
accaggcatgcaagctagacccagg

SEQ ID NO: 5205 - DNA, 25 bp, Artificial Sequence
  Description of Artificial Sequence: Synthetic oligonucleotide
ccaggcatgcaagctagacccagga

SEQ ID NO: 5206 - DNA, 25 bp, Artificial Sequence
  Description of Artificial Sequence: Synthetic oligonucleotide
caggcatgcaagctagacccaggaa

SEQ ID NO: 5207 - DNA, 25 bp, Artificial Sequence
  Description of Artificial Sequence: Synthetic oligonucleotide
aggcatgcaagctagacccaggaat

SEQ ID NO: 5208 - DNA, 25 bp, Artificial Sequence
  Description of Artificial Sequence: Synthetic oligonucleotide
ggcatgcaagctagacccaggaatc

SEQ ID NO: 5209 - DNA, 25 bp, Artificial Sequence
  Description of Artificial Sequence: Synthetic oligonucleotide
gcatgcaagctagacccaggaatca

SEQ ID NO: 5210 - DNA, 25 bp, Artificial Sequence
  Description of Artificial Sequence: Synthetic oligonucleotide
catgcaagctagacccaggaatcaa

SEQ ID NO: 5211 - DNA, 25 bp, Artificial Sequence
  Description of Artificial Sequence: Synthetic oligonucleotide
atgcaagctagacccaggaatcaac

SEQ ID NO: 5212 - DNA, 25 bp, Artificial Sequence
  Description of Artificial Sequence: Synthetic oligonucleotide
tgcaagctagacccaggaatcaacg

SEQ ID NO: 5213 - DNA, 25 bp, Artificial Sequence
  Description of Artificial Sequence: Synthetic oligonucleotide
gcaagctagacccaggaatcaacgg

SEQ ID NO: 5214 - DNA, 25 bp, Artificial Sequence
  Description of Artificial Sequence: Synthetic oligonucleotide
caagctagacccaggaatcaacggg

SEQ ID NO: 5215 - DNA, 25 bp, Artificial Sequence
  Description of Artificial Sequence: Synthetic oligonucleotide
aagctagacccaggaatcaacgggc

SEQ ID NO: 5216 - DNA, 25 bp, Artificial Sequence
  Description of Artificial Sequence: Synthetic oligonucleotide
agctagacccaggaatcaacgggct

SEQ ID NO: 5217 - DNA, 25 bp, Artificial Sequence
  Description of Artificial Sequence: Synthetic oligonucleotide
gctagacccaggaatcaacgggctg

SEQ ID NO: 5218 - DNA, 25 bp, Artificial Sequence
  Description of Artificial Sequence: Synthetic oligonucleotide
ctagacccaggaatcaacgggctga

SEQ ID NO: 5219 - DNA, 25 bp, Artificial Sequence
  Description of Artificial Sequence: Synthetic oligonucleotide
tagacccaggaatcaacgggctgag

SEQ ID NO: 5220 - DNA, 25 bp, Artificial Sequence
  Description of Artificial Sequence: Synthetic oligonucleotide
agacccaggaatcaacgggctgagg

SEQ ID NO: 5221 - DNA, 25 bp, Artificial Sequence
  Description of Artificial Sequence: Synthetic oligonucleotide
gacccaggaatcaacgggctgaggc

SEQ ID NO: 5222 - DNA, 25 bp, Artificial Sequence
  Description of Artificial Sequence: Synthetic oligonucleotide
acccaggaatcaacgggctgaggct

SEQ ID NO: 5223 - DNA, 25 bp, Artificial Sequence
  Description of Artificial Sequence: Synthetic oligonucleotide
cccaggaatcaacgggctgaggctt

SEQ ID NO: 5224 - DNA, 25 bp, Artificial Sequence
  Description of Artificial Sequence: Synthetic oligonucleotide
ccaggaatcaacgggctgaggctta

SEQ ID NO: 5225 - DNA, 25 bp, Artificial Sequence
  Description of Artificial Sequence: Synthetic oligonucleotide
caggaatcaacgggctgaggcttag

SEQ ID NO: 5226 - DNA, 25 bp, Artificial Sequence
  Description of Artificial Sequence: Synthetic oligonucleotide
aggaatcaacgggctgaggcttagc

SEQ ID NO: 5227 - DNA, 25 bp, Artificial Sequence
  Description of Artificial Sequence: Synthetic oligonucleotide
ggaatcaacgggctgaggcttagcg

SEQ ID NO: 5228 - DNA, 25 bp, Artificial Sequence
  Description of Artificial Sequence: Synthetic oligonucleotide
gaatcaacgggctgaggcttagcgt

SEQ ID NO: 5229 - DNA, 25 bp, Artificial Sequence
  Description of Artificial Sequence: Synthetic oligonucleotide
aatcaacgggctgaggcttagcgtc

SEQ ID NO: 5230 - DNA, 25 bp, Artificial Sequence
  Description of Artificial Sequence: Synthetic oligonucleotide
atcaacgggctgaggcttagcgtcc

SEQ ID NO: 5231 - DNA, 25 bp, Artificial Sequence
  Description of Artificial Sequence: Synthetic oligonucleotide
tcaacgggctgaggcttagcgtccc

SEQ ID NO: 5232 - DNA, 25 bp, Artificial Sequence
  Description of Artificial Sequence: Synthetic oligonucleotide
caacgggctgaggcttagcgtcccc

SEQ ID NO: 5233 - DNA, 25 bp, Artificial Sequence
  Description of Artificial Sequence: Synthetic oligonucleotide
aacgggctgaggcttagcgtcccct

SEQ ID NO: 5234 - DNA, 25 bp, Artificial Sequence
  Description of Artificial Sequence: Synthetic oligonucleotide
acgggctgaggcttagcgtccccta

SEQ ID NO: 5235 - DNA, 25 bp, Artificial Sequence
  Description of Artificial Sequence: Synthetic oligonucleotide
cgggctgaggcttagcgtcccctac

SEQ ID NO: 5236 - DNA, 25 bp, Artificial Sequence
  Description of Artificial Sequence: Synthetic oligonucleotide
gggctgaggcttagcgtcccctacg

SEQ ID NO: 5237 - DNA, 25 bp, Artificial Sequence
  Description of Artificial Sequence: Synthetic oligonucleotide
ggctgaggcttagcgtcccctacgg

SEQ ID NO: 5238 - DNA, 25 bp, Artificial Sequence
  Description of Artificial Sequence: Synthetic oligonucleotide
gctgaggcttagcgtcccctacggc

SEQ ID NO: 5239 - DNA, 25 bp, Artificial Sequence
  Description of Artificial Sequence: Synthetic oligonucleotide
ctgaggcttagcgtcccctacggcg

SEQ ID NO: 5240 - DNA, 25 bp, Artificial Sequence
  Description of Artificial Sequence: Synthetic oligonucleotide
tgaggcttagcgtcccctacggcgt

SEQ ID NO: 5241 - DNA, 25 bp, Artificial Sequence
  Description of Artificial Sequence: Synthetic oligonucleotide
gaggcttagcgtcccctacggcgtc

SEQ ID NO: 5242 - DNA, 25 bp, Artificial Sequence
  Description of Artificial Sequence: Synthetic oligonucleotide
aggcttagcgtcccctacggcgtcc

SEQ ID NO: 5243 - DNA, 25 bp, Artificial Sequence
  Description of Artificial Sequence: Synthetic oligonucleotide
ggcttagcgtcccctacggcgtcca

SEQ ID NO: 5244 - DNA, 25 bp, Artificial Sequence
  Description of Artificial Sequence: Synthetic oligonucleotide
gcttagcgtcccctacggcgtccac

SEQ ID NO: 5245 - DNA, 25 bp, Artificial Sequence
  Description of Artificial Sequence: Synthetic oligonucleotide
cttagcgtcccctacggcgtccacc

SEQ ID NO: 5246 - DNA, 25 bp, Artificial Sequence
  Description of Artificial Sequence: Synthetic oligonucleotide
ttagcgtcccctacggcgtccacca

SEQ ID NO: 5247 - DNA, 25 bp, Artificial Sequence
  Description of Artificial Sequence: Synthetic oligonucleotide
tagcgtcccctacggcgtccaccag

SEQ ID NO: 5248 - DNA, 25 bp, Artificial Sequence
  Description of Artificial Sequence: Synthetic oligonucleotide
agcgtcccctacggcgtccaccagc

SEQ ID NO: 5249 - DNA, 25 bp, Artificial Sequence
  Description of Artificial Sequence: Synthetic oligonucleotide
gcgtcccctacggcgtccaccagcc

SEQ ID NO: 5250 - DNA, 25 bp, Artificial Sequence
  Description of Artificial Sequence: Synthetic oligonucleotide
cgtcccctacggcgtccaccagcct

SEQ ID NO: 5251 - DNA, 25 bp, Artificial Sequence
  Description of Artificial Sequence: Synthetic oligonucleotide
gtcccctacggcgtccaccagcctg

SEQ ID NO: 5252 - DNA, 25 bp, Artificial Sequence
  Description of Artificial Sequence: Synthetic oligonucleotide
tcccctacggcgtccaccagcctga

SEQ ID NO: 5253 - DNA, 25 bp, Artificial Sequence
  Description of Artificial Sequence: Synthetic oligonucleotide
cccctacggcgtccaccagcctgac

SEQ ID NO: 5254 - DNA, 25 bp, Artificial Sequence
  Description of Artificial Sequence: Synthetic oligonucleotide
ccctacggcgtccaccagcctgacc

SEQ ID NO: 5255 - DNA, 25 bp, Artificial Sequence
  Description of Artificial Sequence: Synthetic oligonucleotide
cctacggcgtccaccagcctgaccg

SEQ ID NO: 5256 - DNA, 25 bp, Artificial Sequence
  Description of Artificial Sequence: Synthetic oligonucleotide
ctacggcgtccaccagcctgaccgc

SEQ ID NO: 5257 - DNA, 25 bp, Artificial Sequence
  Description of Artificial Sequence: Synthetic oligonucleotide
tacggcgtccaccagcctgaccgcg

SEQ ID NO: 5258 - DNA, 25 bp, Artificial Sequence
  Description of Artificial Sequence: Synthetic oligonucleotide
acggcgtccaccagcctgaccgcgg

SEQ ID NO: 5259 - DNA, 25 bp, Artificial Sequence
  Description of Artificial Sequence: Synthetic oligonucleotide
cggcgtccaccagcctgaccgcggg

SEQ ID NO: 5260 - DNA, 25 bp, Artificial Sequence
  Description of Artificial Sequence: Synthetic oligonucleotide
ggcgtccaccagcctgaccgcgggc

SEQ ID NO: 5261 - DNA, 25 bp, Artificial Sequence
  Description of Artificial Sequence: Synthetic oligonucleotide
gcgtccaccagcctgaccgcgggcc

SEQ ID NO: 5262 - DNA, 25 bp, Artificial Sequence
  Description of Artificial Sequence: Synthetic oligonucleotide
cgtccaccagcctgaccgcgggcct

SEQ ID NO: 5263 - DNA, 25 bp, Artificial Sequence
  Description of Artificial Sequence: Synthetic oligonucleotide
gtccaccagcctgaccgcgggcctg

SEQ ID NO: 5264 - DNA, 25 bp, Artificial Sequence
  Description of Artificial Sequence: Synthetic oligonucleotide
tccaccagcctgaccgcgggcctgc

SEQ ID NO: 5265 - DNA, 25 bp, Artificial Sequence
  Description of Artificial Sequence: Synthetic oligonucleotide
ccaccagcctgaccgcgggcctgct

SEQ ID NO: 5266 - DNA, 25 bp, Artificial Sequence
  Description of Artificial Sequence: Synthetic oligonucleotide
caccagcctgaccgcgggcctgctg

SEQ ID NO: 5267 - DNA, 25 bp, Artificial Sequence
  Description of Artificial Sequence: Synthetic oligonucleotide
accagcctgaccgcgggcctgctgg

SEQ ID NO: 5268 - DNA, 25 bp, Artificial Sequence
  Description of Artificial Sequence: Synthetic oligonucleotide
ccagcctgaccgcgggcctgctggg

SEQ ID NO: 5269 - DNA, 25 bp, Artificial Sequence
  Description of Artificial Sequence: Synthetic oligonucleotide
cagcctgaccgcgggcctgctgggc

SEQ ID NO: 5270 - DNA, 25 bp, Artificial Sequence
  Description of Artificial Sequence: Synthetic oligonucleotide
agcctgaccgcgggcctgctgggcc

SEQ ID NO: 5271 - DNA, 25 bp, Artificial Sequence
  Description of Artificial Sequence: Synthetic oligonucleotide
gcctgaccgcgggcctgctgggccc

SEQ ID NO: 5272 - DNA, 25 bp, Artificial Sequence
  Description of Artificial Sequence: Synthetic oligonucleotide
cctgaccgcgggcctgctgggcccg

SEQ ID NO: 5273 - DNA, 25 bp, Artificial Sequence
  Description of Artificial Sequence: Synthetic oligonucleotide
ctgaccgcgggcctgctgggcccgg

SEQ ID NO: 5274 - DNA, 25 bp, Artificial Sequence
  Description of Artificial Sequence: Synthetic oligonucleotide
tgaccgcgggcctgctgggcccggg

SEQ ID NO: 5275 - DNA, 25 bp, Artificial Sequence
  Description of Artificial Sequence: Synthetic oligonucleotide
gaccgcgggcctgctgggcccgggg

SEQ ID NO: 5276 - DNA, 25 bp, Artificial Sequence
  Description of Artificial Sequence: Synthetic oligonucleotide
accgcgggcctgctgggcccggggg

SEQ ID NO: 5277 - DNA, 25 bp, Artificial Sequence
  Description of Artificial Sequence: Synthetic oligonucleotide
ccgcgggcctgctgggcccgggggg

SEQ ID NO: 5278 - DNA, 25 bp, Artificial Sequence
  Description of Artificial Sequence: Synthetic oligonucleotide
cgcgggcctgctgggcccgggggga

SEQ ID NO: 5279 - DNA, 25 bp, Artificial Sequence
  Description of Artificial Sequence: Synthetic oligonucleotide
gcgggcctgctgggcccggggggag

SEQ ID NO: 5280 - DNA, 25 bp, Artificial Sequence
  Description of Artificial Sequence: Synthetic oligonucleotide
cgggcctgctgggcccggggggagg

SEQ ID NO: 5281 - DNA, 25 bp, Artificial Sequence
  Description of Artificial Sequence: Synthetic oligonucleotide
gggcctgctgggcccggggggaggg

SEQ ID NO: 5282 - DNA, 25 bp, Artificial Sequence
  Description of Artificial Sequence: Synthetic oligonucleotide
ggcctgctgggcccggggggagggg

SEQ ID NO: 5283 - DNA, 25 bp, Artificial Sequence
  Description of Artificial Sequence: Synthetic oligonucleotide
gcctgctgggcccggggggaggggc

SEQ ID NO: 5284 - DNA, 25 bp, Artificial Sequence
  Description of Artificial Sequence: Synthetic oligonucleotide
cctgctgggcccggggggaggggcc

SEQ ID NO: 5285 - DNA, 25 bp, Artificial Sequence
  Description of Artificial Sequence: Synthetic oligonucleotide
ctgctgggcccggggggaggggcct

SEQ ID NO: 5286 - DNA, 25 bp, Artificial Sequence
  Description of Artificial Sequence: Synthetic oligonucleotide
tgctgggcccggggggaggggcctt

SEQ ID NO: 5287 - DNA, 25 bp, Artificial Sequence
  Description of Artificial Sequence: Synthetic oligonucleotide
gctgggcccggggggaggggccttc

SEQ ID NO: 5288 - DNA, 25 bp, Artificial Sequence
  Description of Artificial Sequence: Synthetic oligonucleotide
ctgggcccggggggaggggccttcc

SEQ ID NO: 5289 - DNA, 25 bp, Artificial Sequence
  Description of Artificial Sequence: Synthetic oligonucleotide
tgggcccggggggaggggccttcct

SEQ ID NO: 5290 - DNA, 25 bp, Artificial Sequence
  Description of Artificial Sequence: Synthetic oligonucleotide
gggcccggggggaggggccttcctg

SEQ ID NO: 5291 - DNA, 25 bp, Artificial Sequence
  Description of Artificial Sequence: Synthetic oligonucleotide
ggcccggggggaggggccttcctgc

SEQ ID NO: 5292 - DNA, 25 bp, Artificial Sequence
  Description of Artificial Sequence: Synthetic oligonucleotide
gcccggggggaggggccttcctgct

SEQ ID NO: 5293 - DNA, 25 bp, Artificial Sequence
  Description of Artificial Sequence: Synthetic oligonucleotide
cccggggggaggggccttcctgctg

SEQ ID NO: 5294 - DNA, 25 bp, Artificial Sequence
  Description of Artificial Sequence: Synthetic oligonucleotide
ccggggggaggggccttcctgctgg

SEQ ID NO: 5295 - DNA, 25 bp, Artificial Sequence
  Description of Artificial Sequence: Synthetic oligonucleotide
cggggggaggggccttcctgctggg

SEQ ID NO: 5296 - DNA, 25 bp, Artificial Sequence
  Description of Artificial Sequence: Synthetic oligonucleotide
ggggggaggggccttcctgctgggg

SEQ ID NO: 5297 - DNA, 25 bp, Artificial Sequence
  Description of Artificial Sequence: Synthetic oligonucleotide
gggggaggggccttcctgctggggt

SEQ ID NO: 5298 - DNA, 25 bp, Artificial Sequence
  Description of Artificial Sequence: Synthetic oligonucleotide
ggggaggggccttcctgctggggtc

SEQ ID NO: 5299 - DNA, 25 bp, Artificial Sequence
  Description of Artificial Sequence: Synthetic oligonucleotide
gggaggggccttcctgctggggtcg

SEQ ID NO: 5300 - DNA, 25 bp, Artificial Sequence
  Description of Artificial Sequence: Synthetic oligonucleotide
ggaggggccttcctgctggggtcga

SEQ ID NO: 5301 - DNA, 25 bp, Artificial Sequence
  Description of Artificial Sequence: Synthetic oligonucleotide
gaggggccttcctgctggggtcgag

SEQ ID NO: 5302 - DNA, 25 bp, Artificial Sequence
  Description of Artificial Sequence: Synthetic oligonucleotide
aggggccttcctgctggggtcgagc

SEQ ID NO: 5303 - DNA, 25 bp, Artificial Sequence
  Description of Artificial Sequence: Synthetic oligonucleotide
ggggccttcctgctggggtcgagct

SEQ ID NO: 5304 - DNA, 25 bp, Artificial Sequence
  Description of Artificial Sequence: Synthetic oligonucleotide
gggccttcctgctggggtcgagctg

SEQ ID NO: 5305 - DNA, 25 bp, Artificial Sequence
  Description of Artificial Sequence: Synthetic oligonucleotide
ggccttcctgctggggtcgagctgc

SEQ ID NO: 5306 - DNA, 25 bp, Artificial Sequence
  Description of Artificial Sequence: Synthetic oligonucleotide
gccttcctgctggggtcgagctgca

SEQ ID NO: 5307 - DNA, 25 bp, Artificial Sequence
  Description of Artificial Sequence: Synthetic oligonucleotide
ccttcctgctggggtcgagctgcag

SEQ ID NO: 5308 - DNA, 25 bp, Artificial Sequence
  Description of Artificial Sequence: Synthetic oligonucleotide
cttcctgctggggtcgagctgcagc

SEQ ID NO: 5309 - DNA, 25 bp, Artificial Sequence
  Description of Artificial Sequence: Synthetic oligonucleotide
ttcctgctggggtcgagctgcagcg

SEQ ID NO: 5310 - DNA, 25 bp, Artificial Sequence
  Description of Artificial Sequence: Synthetic oligonucleotide
tcctgctggggtcgagctgcagcgc

SEQ ID NO: 5311 - DNA, 25 bp, Artificial Sequence
  Description of Artificial Sequence: Synthetic oligonucleotide
cctgctggggtcgagctgcagcgca

SEQ ID NO: 5312 - DNA, 25 bp, Artificial Sequence
  Description of Artificial Sequence: Synthetic oligonucleotide
ctgctggggtcgagctgcagcgcac

SEQ ID NO: 5313 - DNA, 25 bp, Artificial Sequence
  Description of Artificial Sequence: Synthetic oligonucleotide
tgctggggtcgagctgcagcgcacg

SEQ ID NO: 5314 - DNA, 25 bp, Artificial Sequence
  Description of Artificial Sequence: Synthetic oligonucleotide
gctggggtcgagctgcagcgcacgg

SEQ ID NO: 5315 - DNA, 25 bp, Artificial Sequence
  Description of Artificial Sequence: Synthetic oligonucleotide
ctggggtcgagctgcagcgcacggg

SEQ ID NO: 5316 - DNA, 25 bp, Artificial Sequence
  Description of Artificial Sequence: Synthetic oligonucleotide
tggggtcgagctgcagcgcacgggt

SEQ ID NO: 5317 - DNA, 25 bp, Artificial Sequence
  Description of Artificial Sequence: Synthetic oligonucleotide
ggggtcgagctgcagcgcacgggtg

SEQ ID NO: 5318 - DNA, 25 bp, Artificial Sequence
  Description of Artificial Sequence: Synthetic oligonucleotide
gggtcgagctgcagcgcacgggtgg

SEQ ID NO: 5319 - DNA, 25 bp, Artificial Sequence
  Description of Artificial Sequence: Synthetic oligonucleotide
ggtcgagctgcagcgcacgggtggg

SEQ ID NO: 5320 - DNA, 25 bp, Artificial Sequence
  Description of Artificial Sequence: Synthetic oligonucleotide
gtcgagctgcagcgcacgggtgggc

SEQ ID NO: 5321 - DNA, 25 bp, Artificial Sequence
  Description of Artificial Sequence: Synthetic oligonucleotide
tcgagctgcagcgcacgggtgggca

SEQ ID NO: 5322 - DNA, 25 bp, Artificial Sequence
  Description of Artificial Sequence: Synthetic oligonucleotide
cgagctgcagcgcacgggtgggcat

SEQ ID NO: 5323 - DNA, 25 bp, Artificial Sequence
  Description of Artificial Sequence: Synthetic oligonucleotide
gagctgcagcgcacgggtgggcatt

SEQ ID NO: 5324 - DNA, 25 bp, Artificial Sequence
  Description of Artificial Sequence: Synthetic oligonucleotide
agctgcagcgcacgggtgggcatta

SEQ ID NO: 5325 - DNA, 25 bp, Artificial Sequence
  Description of Artificial Sequence: Synthetic oligonucleotide
gctgcagcgcacgggtgggcattag

SEQ ID NO: 5326 - DNA, 25 bp, Artificial Sequence
  Description of Artificial Sequence: Synthetic oligonucleotide
ctgcagcgcacgggtgggcattaga

SEQ ID NO: 5327 - DNA, 25 bp, Artificial Sequence
  Description of Artificial Sequence: Synthetic oligonucleotide
tgcagcgcacgggtgggcattagag

SEQ ID NO: 5328 - DNA, 25 bp, Artificial Sequence
  Description of Artificial Sequence: Synthetic oligonucleotide
gcagcgcacgggtgggcattagagg

SEQ ID NO: 5329 - DNA, 25 bp, Artificial Sequence
  Description of Artificial Sequence: Synthetic oligonucleotide
cagcgcacgggtgggcattagaggc

SEQ ID NO: 5330 - DNA, 25 bp, Artificial Sequence
  Description of Artificial Sequence: Synthetic oligonucleotide
agcgcacgggtgggcattagaggca

SEQ ID NO: 5331 - DNA, 25 bp, Artificial Sequence
  Description of Artificial Sequence: Synthetic oligonucleotide
gcgcacgggtgggcattagaggcac

SEQ ID NO: 5332 - DNA, 25 bp, Artificial Sequence
  Description of Artificial Sequence: Synthetic oligonucleotide
cgcacgggtgggcattagaggcaca

SEQ ID NO: 5333 - DNA, 25 bp, Artificial Sequence
  Description of Artificial Sequence: Synthetic oligonucleotide
gcacgggtgggcattagaggcacaa

SEQ ID NO: 5334 - DNA, 25 bp, Artificial Sequence
  Description of Artificial Sequence: Synthetic oligonucleotide
cacgggtgggcattagaggcacaat

SEQ ID NO: 5335 - DNA, 25 bp, Artificial Sequence
  Description of Artificial Sequence: Synthetic oligonucleotide
acgggtgggcattagaggcacaata

SEQ ID NO: 5336 - DNA, 25 bp, Artificial Sequence
  Description of Artificial Sequence: Synthetic oligonucleotide
cgggtgggcattagaggcacaatag

SEQ ID NO: 5337 - DNA, 25 bp, Artificial Sequence
  Description of Artificial Sequence: Synthetic oligonucleotide
gggtgggcattagaggcacaataga

SEQ ID NO: 5338 - DNA, 25 bp, Artificial Sequence
  Description of Artificial Sequence: Synthetic oligonucleotide
ggtgggcattagaggcacaatagag

SEQ ID NO: 5339 - DNA, 25 bp, Artificial Sequence
  Description of Artificial Sequence: Synthetic oligonucleotide
gtgggcattagaggcacaatagagc

SEQ ID NO: 5340 - DNA, 25 bp, Artificial Sequence
  Description of Artificial Sequence: Synthetic oligonucleotide
tgggcattagaggcacaatagagca

SEQ ID NO: 5341 - DNA, 25 bp, Artificial Sequence
  Description of Artificial Sequence: Synthetic oligonucleotide
gggcattagaggcacaatagagcag

SEQ ID NO: 5342 - DNA, 25 bp, Artificial Sequence
  Description of Artificial Sequence: Synthetic oligonucleotide
ggcattagaggcacaatagagcagg

SEQ ID NO: 5343 - DNA, 25 bp, Artificial Sequence
  Description of Artificial Sequence: Synthetic oligonucleotide
gcattagaggcacaatagagcaggt

SEQ ID NO: 5344 - DNA, 25 bp, Artificial Sequence
  Description of Artificial Sequence: Synthetic oligonucleotide
cattagaggcacaatagagcaggtt

SEQ ID NO: 5345 - DNA, 25 bp, Artificial Sequence
  Description of Artificial Sequence: Synthetic oligonucleotide
attagaggcacaatagagcaggtta

SEQ ID NO: 5346 - DNA, 25 bp, Artificial Sequence
  Description of Artificial Sequence: Synthetic oligonucleotide
ttagaggcacaatagagcaggttag

SEQ ID NO: 5347 - DNA, 25 bp, Artificial Sequence
  Description of Artificial Sequence: Synthetic oligonucleotide
tagaggcacaatagagcaggttagt

SEQ ID NO: 5348 - DNA, 25 bp, Artificial Sequence
  Description of Artificial Sequence: Synthetic oligonucleotide
agaggcacaatagagcaggttagtt

SEQ ID NO: 5349 - DNA, 25 bp, Artificial Sequence
  Description of Artificial Sequence: Synthetic oligonucleotide
gaggcacaatagagcaggttagtta

SEQ ID NO: 5350 - DNA, 25 bp, Artificial Sequence
  Description of Artificial Sequence: Synthetic oligonucleotide
aggcacaatagagcaggttagttag

SEQ ID NO: 5351 - DNA, 25 bp, Artificial Sequence
  Description of Artificial Sequence: Synthetic oligonucleotide
ggcacaatagagcaggttagttaga

SEQ ID NO: 5352 - DNA, 25 bp, Artificial Sequence
  Description of Artificial Sequence: Synthetic oligonucleotide
ttttttatatgaggtttaaaaaatc

SEQ ID NO: 5353 - DNA, 25 bp, Artificial Sequence
  Description of Artificial Sequence: Synthetic oligonucleotide
tttttatatgaggtttaaaaaatcc

SEQ ID NO: 5354 - DNA, 25 bp, Artificial Sequence
  Description of Artificial Sequence: Synthetic oligonucleotide
ttttatatgaggtttaaaaaatcca

SEQ ID NO: 5355 - DNA, 25 bp, Artificial Sequence
  Description of Artificial Sequence: Synthetic oligonucleotide
tttatatgaggtttaaaaaatccat

SEQ ID NO: 5356 - DNA, 25 bp, Artificial Sequence
  Description of Artificial Sequence: Synthetic oligonucleotide
ttatatgaggtttaaaaaatccata

SEQ ID NO: 5357 - DNA, 25 bp, Artificial Sequence
  Description of Artificial Sequence: Synthetic oligonucleotide
tatatgaggtttaaaaaatccatat

SEQ ID NO: 5358 - DNA, 25 bp, Artificial Sequence
  Description of Artificial Sequence: Synthetic oligonucleotide
atatgaggtttaaaaaatccatatt

SEQ ID NO: 5359 - DNA, 25 bp, Artificial Sequence
  Description of Artificial Sequence: Synthetic oligonucleotide
tatgaggtttaaaaaatccatattt

SEQ ID NO: 5360 - DNA, 25 bp, Artificial Sequence
  Description of Artificial Sequence: Synthetic oligonucleotide
atgaggtttaaaaaatccatatttt

SEQ ID NO: 5361 - DNA, 25 bp, Artificial Sequence
  Description of Artificial Sequence: Synthetic oligonucleotide
tgaggtttaaaaaatccatattttt

SEQ ID NO: 5362 - DNA, 25 bp, Artificial Sequence
  Description of Artificial Sequence: Synthetic oligonucleotide
gaggtttaaaaaatccatatttttc

SEQ ID NO: 5363 - DNA, 25 bp, Artificial Sequence
  Description of Artificial Sequence: Synthetic oligonucleotide
aggtttaaaaaatccatatttttca

SEQ ID NO: 5364 - DNA, 25 bp, Artificial Sequence
  Description of Artificial Sequence: Synthetic oligonucleotide
ggtttaaaaaatccatatttttcat

SEQ ID NO: 5365 - DNA, 25 bp, Artificial Sequence
  Description of Artificial Sequence: Synthetic oligonucleotide
gtttaaaaaatccatatttttcatt

SEQ ID NO: 5366 - DNA, 25 bp, Artificial Sequence
  Description of Artificial Sequence: Synthetic oligonucleotide
tttaaaaaatccatatttttcatta

SEQ ID NO: 5367 - DNA, 25 bp, Artificial Sequence
  Description of Artificial Sequence: Synthetic oligonucleotide
ttaaaaaatccatatttttcattac

SEQ ID NO: 5368 - DNA, 25 bp, Artificial Sequence
  Description of Artificial Sequence: Synthetic oligonucleotide
taaaaaatccatatttttcattact

SEQ ID NO: 5369 - DNA, 25 bp, Artificial Sequence
  Description of Artificial Sequence: Synthetic oligonucleotide
aaaaaatccatatttttcattactc

SEQ ID NO: 5370 - DNA, 25 bp, Artificial Sequence
  Description of Artificial Sequence: Synthetic oligonucleotide
aaaaatccatatttttcattactcc

SEQ ID NO: 5371 - DNA, 25 bp, Artificial Sequence
  Description of Artificial Sequence: Synthetic oligonucleotide
aaaatccatatttttcattactcct

SEQ ID NO: 5372 - DNA, 25 bp, Artificial Sequence
  Description of Artificial Sequence: Synthetic oligonucleotide
aaatccatatttttcattactcctc

SEQ ID NO: 5373 - DNA, 25 bp, Artificial Sequence
  Description of Artificial Sequence: Synthetic oligonucleotide
aatccatatttttcattactcctct

SEQ ID NO: 5374 - DNA, 25 bp, Artificial Sequence
  Description of Artificial Sequence: Synthetic oligonucleotide
atccatatttttcattactcctctt

SEQ ID NO: 5375 - DNA, 25 bp, Artificial Sequence
  Description of Artificial Sequence: Synthetic oligonucleotide
tccatatttttcattactcctcttc

SEQ ID NO: 5376 - DNA, 25 bp, Artificial Sequence
  Description of Artificial Sequence: Synthetic oligonucleotide
ccatatttttcattactcctcttct

SEQ ID NO: 5377 - DNA, 25 bp, Artificial Sequence
  Description of Artificial Sequence: Synthetic oligonucleotide
catatttttcattactcctcttcta

SEQ ID NO: 5378 - DNA, 25 bp, Artificial Sequence
  Description of Artificial Sequence: Synthetic oligonucleotide
atatttttcattactcctcttctag

SEQ ID NO: 5379 - DNA, 25 bp, Artificial Sequence
  Description of Artificial Sequence: Synthetic oligonucleotide
tatttttcattactcctcttctagg

SEQ ID NO: 5380 - DNA, 25 bp, Artificial Sequence
  Description of Artificial Sequence: Synthetic oligonucleotide
atttttcattactcctcttctaggt

SEQ ID NO: 5381 - DNA, 25 bp, Artificial Sequence
  Description of Artificial Sequence: Synthetic oligonucleotide
tttttcattactcctcttctaggtt

SEQ ID NO: 5382 - DNA, 25 bp, Artificial Sequence
  Description of Artificial Sequence: Synthetic oligonucleotide
ttttcattactcctcttctaggttc

SEQ ID NO: 5383 - DNA, 25 bp, Artificial Sequence
  Description of Artificial Sequence: Synthetic oligonucleotide
tttcattactcctcttctaggttct

SEQ ID NO: 5384 - DNA, 25 bp, Artificial Sequence
  Description of Artificial Sequence: Synthetic oligonucleotide
ttcattactcctcttctaggttctg

SEQ ID NO: 5385 - DNA, 25 bp, Artificial Sequence
  Description of Artificial Sequence: Synthetic oligonucleotide
tcattactcctcttctaggttctga

SEQ ID NO: 5386 - DNA, 25 bp, Artificial Sequence
  Description of Artificial Sequence: Synthetic oligonucleotide
cattactcctcttctaggttctgag

SEQ ID NO: 5387 - DNA, 25 bp, Artificial Sequence
  Description of Artificial Sequence: Synthetic oligonucleotide
attactcctcttctaggttctgagt

SEQ ID NO: 5388 - DNA, 25 bp, Artificial Sequence
  Description of Artificial Sequence: Synthetic oligonucleotide
ttactcctcttctaggttctgagtc

SEQ ID NO: 5389 - DNA, 25 bp, Artificial Sequence
  Description of Artificial Sequence: Synthetic oligonucleotide
tactcctcttctaggttctgagtct

SEQ ID NO: 5390 - DNA, 25 bp, Artificial Sequence
  Description of Artificial Sequence: Synthetic oligonucleotide
actcctcttctaggttctgagtctt

SEQ ID NO: 5391 - DNA, 25 bp, Artificial Sequence
  Description of Artificial Sequence: Synthetic oligonucleotide
ctcctcttctaggttctgagtcttc

SEQ ID NO: 5392 - DNA, 25 bp, Artificial Sequence
  Description of Artificial Sequence: Synthetic oligonucleotide
tcctcttctaggttctgagtcttct

SEQ ID NO: 5393 - DNA, 25 bp, Artificial Sequence
  Description of Artificial Sequence: Synthetic oligonucleotide
cctcttctaggttctgagtcttctg

SEQ ID NO: 5394 - DNA, 25 bp, Artificial Sequence
  Description of Artificial Sequence: Synthetic oligonucleotide
ctcttctaggttctgagtcttctgg

SEQ ID NO: 5395 - DNA, 25 bp, Artificial Sequence
  Description of Artificial Sequence: Synthetic oligonucleotide
tcttctaggttctgagtcttctggt

SEQ ID NO: 5396 - DNA, 25 bp, Artificial Sequence
  Description of Artificial Sequence: Synthetic oligonucleotide
cttctaggttctgagtcttctggta

SEQ ID NO: 5397 - DNA, 25 bp, Artificial Sequence
  Description of Artificial Sequence: Synthetic oligonucleotide
ttctaggttctgagtcttctggtag

SEQ ID NO: 5398 - DNA, 25 bp, Artificial Sequence
  Description of Artificial Sequence: Synthetic oligonucleotide
tctaggttctgagtcttctggtagt

SEQ ID NO: 5399 - DNA, 25 bp, Artificial Sequence
  Description of Artificial Sequence: Synthetic oligonucleotide
ctaggttctgagtcttctggtagtg

SEQ ID NO: 5400 - DNA, 25 bp, Artificial Sequence
  Description of Artificial Sequence: Synthetic oligonucleotide
taggttctgagtcttctggtagtgt

SEQ ID NO: 5401 - DNA, 25 bp, Artificial Sequence
  Description of Artificial Sequence: Synthetic oligonucleotide
aggttctgagtcttctggtagtgta

SEQ ID NO: 5402 - DNA, 25 bp, Artificial Sequence
  Description of Artificial Sequence: Synthetic oligonucleotide
ggttctgagtcttctggtagtgtag

SEQ ID NO: 5403 - DNA, 25 bp, Artificial Sequence
  Description of Artificial Sequence: Synthetic oligonucleotide
gttctgagtcttctggtagtgtagg

SEQ ID NO: 5404 - DNA, 25 bp, Artificial Sequence
  Description of Artificial Sequence: Synthetic oligonucleotide
ttctgagtcttctggtagtgtaggg

SEQ ID NO: 5405 - DNA, 25 bp, Artificial Sequence
  Description of Artificial Sequence: Synthetic oligonucleotide
tctgagtcttctggtagtgtagggt

SEQ ID NO: 5406 - DNA, 25 bp, Artificial Sequence
  Description of Artificial Sequence: Synthetic oligonucleotide
ctgagtcttctggtagtgtagggtc

SEQ ID NO: 5407 - DNA, 25 bp, Artificial Sequence
  Description of Artificial Sequence: Synthetic oligonucleotide
tgagtcttctggtagtgtagggtca

SEQ ID NO: 5408 - DNA, 25 bp, Artificial Sequence
  Description of Artificial Sequence: Synthetic oligonucleotide
gagtcttctggtagtgtagggtcat

SEQ ID NO: 5409 - DNA, 25 bp, Artificial Sequence
  Description of Artificial Sequence: Synthetic oligonucleotide
agtcttctggtagtgtagggtcatc

SEQ ID NO: 5410 - DNA, 25 bp, Artificial Sequence
  Description of Artificial Sequence: Synthetic oligonucleotide
gtcttctggtagtgtagggtcatct

SEQ ID NO: 5411 - DNA, 25 bp, Artificial Sequence
  Description of Artificial Sequence: Synthetic oligonucleotide
tcttctggtagtgtagggtcatcta

SEQ ID NO: 5412 - DNA, 25 bp, Artificial Sequence
  Description of Artificial Sequence: Synthetic oligonucleotide
cttctggtagtgtagggtcatctac

SEQ ID NO: 5413 - DNA, 25 bp, Artificial Sequence
  Description of Artificial Sequence: Synthetic oligonucleotide
ttctggtagtgtagggtcatctaca

SEQ ID NO: 5414 - DNA, 25 bp, Artificial Sequence
  Description of Artificial Sequence: Synthetic oligonucleotide
tctggtagtgtagggtcatctacag

SEQ ID NO: 5415 - DNA, 25 bp, Artificial Sequence
  Description of Artificial Sequence: Synthetic oligonucleotide
ctggtagtgtagggtcatctacagg

SEQ ID NO: 5416 - DNA, 25 bp, Artificial Sequence
  Description of Artificial Sequence: Synthetic oligonucleotide
tggtagtgtagggtcatctacaggc

SEQ ID NO: 5417 - DNA, 25 bp, Artificial Sequence
  Description of Artificial Sequence: Synthetic oligonucleotide
ggtagtgtagggtcatctacaggct

SEQ ID NO: 5418 - DNA, 25 bp, Artificial Sequence
  Description of Artificial Sequence: Synthetic oligonucleotide
gtagtgtagggtcatctacaggctc

SEQ ID NO: 5419 - DNA, 25 bp, Artificial Sequence
  Description of Artificial Sequence: Synthetic oligonucleotide
tagtgtagggtcatctacaggctct

SEQ ID NO: 5420 - DNA, 25 bp, Artificial Sequence
  Description of Artificial Sequence: Synthetic oligonucleotide
agtgtagggtcatctacaggctctc

SEQ ID NO: 5421 - DNA, 25 bp, Artificial Sequence
  Description of Artificial Sequence: Synthetic oligonucleotide
gtgtagggtcatctacaggctctct

SEQ ID NO: 5422 - DNA, 25 bp, Artificial Sequence
  Description of Artificial Sequence: Synthetic oligonucleotide
tgtagggtcatctacaggctctctt

SEQ ID NO: 5423 - DNA, 25 bp, Artificial Sequence
  Description of Artificial Sequence: Synthetic oligonucleotide
gtagggtcatctacaggctctcttt

SEQ ID NO: 5424 - DNA, 25 bp, Artificial Sequence
  Description of Artificial Sequence: Synthetic oligonucleotide
tagggtcatctacaggctctctttc

SEQ ID NO: 5425 - DNA, 25 bp, Artificial Sequence
  Description of Artificial Sequence: Synthetic oligonucleotide
agggtcatctacaggctctctttct

SEQ ID NO: 5426 - DNA, 25 bp, Artificial Sequence
  Description of Artificial Sequence: Synthetic oligonucleotide
gggtcatctacaggctctctttctc

SEQ ID NO: 5427 - DNA, 25 bp, Artificial Sequence
  Description of Artificial Sequence: Synthetic oligonucleotide
ggtcatctacaggctctctttctca

SEQ ID NO: 5428 - DNA, 25 bp, Artificial Sequence
  Description of Artificial Sequence: Synthetic oligonucleotide
gtcatctacaggctctctttctcac

SEQ ID NO: 5429 - DNA, 25 bp, Artificial Sequence
  Description of Artificial Sequence: Synthetic oligonucleotide
tcatctacaggctctctttctcaca

SEQ ID NO: 5430 - DNA, 25 bp, Artificial Sequence
  Description of Artificial Sequence: Synthetic oligonucleotide
catctacaggctctctttctcacat

SEQ ID NO: 5431 - DNA, 25 bp, Artificial Sequence
  Description of Artificial Sequence: Synthetic oligonucleotide
atctacaggctctctttctcacatc

SEQ ID NO: 5432 - DNA, 25 bp, Artificial Sequence
  Description of Artificial Sequence: Synthetic oligonucleotide
tctacaggctctctttctcacatcc

SEQ ID NO: 5433 - DNA, 25 bp, Artificial Sequence
  Description of Artificial Sequence: Synthetic oligonucleotide
ctacaggctctctttctcacatcca

SEQ ID NO: 5434 - DNA, 25 bp, Artificial Sequence
  Description of Artificial Sequence: Synthetic oligonucleotide
tacaggctctctttctcacatccag

SEQ ID NO: 5435 - DNA, 25 bp, Artificial Sequence
  Description of Artificial Sequence: Synthetic oligonucleotide
acaggctctctttctcacatccagc

SEQ ID NO: 5436 - DNA, 25 bp, Artificial Sequence
  Description of Artificial Sequence: Synthetic oligonucleotide
caggctctctttctcacatccagca

SEQ ID NO: 5437 - DNA, 25 bp, Artificial Sequence
  Description of Artificial Sequence: Synthetic oligonucleotide
aggctctctttctcacatccagcag

SEQ ID NO: 5438 - DNA, 25 bp, Artificial Sequence
  Description of Artificial Sequence: Synthetic oligonucleotide
ggctctctttctcacatccagcagc

SEQ ID NO: 5439 - DNA, 25 bp, Artificial Sequence
  Description of Artificial Sequence: Synthetic oligonucleotide
gctctctttctcacatccagcagcc

SEQ ID NO: 5440 - DNA, 25 bp, Artificial Sequence
  Description of Artificial Sequence: Synthetic oligonucleotide
ctctctttctcacatccagcagcct

SEQ ID NO: 5441 - DNA, 25 bp, Artificial Sequence
  Description of Artificial Sequence: Synthetic oligonucleotide
tctctttctcacatccagcagcctc

SEQ ID NO: 5442 - DNA, 25 bp, Artificial Sequence
  Description of Artificial Sequence: Synthetic oligonucleotide
ctctttctcacatccagcagcctct

SEQ ID NO: 5443 - DNA, 25 bp, Artificial Sequence
  Description of Artificial Sequence: Synthetic oligonucleotide
tctttctcacatccagcagcctctt

SEQ ID NO: 5444 - DNA, 25 bp, Artificial Sequence
  Description of Artificial Sequence: Synthetic oligonucleotide
ctttctcacatccagcagcctcttc

SEQ ID NO: 5445 - DNA, 25 bp, Artificial Sequence
  Description of Artificial Sequence: Synthetic oligonucleotide
tttctcacatccagcagcctcttcc

SEQ ID NO: 5446 - DNA, 25 bp, Artificial Sequence
  Description of Artificial Sequence: Synthetic oligonucleotide
ttctcacatccagcagcctcttcca

SEQ ID NO: 5447 - DNA, 25 bp, Artificial Sequence
  Description of Artificial Sequence: Synthetic oligonucleotide
tctcacatccagcagcctcttccag

SEQ ID NO: 5448 - DNA, 25 bp, Artificial Sequence
  Description of Artificial Sequence: Synthetic oligonucleotide
ctcacatccagcagcctcttccagg

SEQ ID NO: 5449 - DNA, 25 bp, Artificial Sequence
  Description of Artificial Sequence: Synthetic oligonucleotide
tcacatccagcagcctcttccaggt

SEQ ID NO: 5450 - DNA, 25 bp, Artificial Sequence
  Description of Artificial Sequence: Synthetic oligonucleotide
cacatccagcagcctcttccaggta

SEQ ID NO: 5451 - DNA, 25 bp, Artificial Sequence
  Description of Artificial Sequence: Synthetic oligonucleotide
acatccagcagcctcttccaggtac

SEQ ID NO: 5452 - DNA, 25 bp, Artificial Sequence
  Description of Artificial Sequence: Synthetic oligonucleotide
catccagcagcctcttccaggtaca

SEQ ID NO: 5453 - DNA, 25 bp, Artificial Sequence
  Description of Artificial Sequence: Synthetic oligonucleotide
atccagcagcctcttccaggtacag

SEQ ID NO: 5454 - DNA, 25 bp, Artificial Sequence
  Description of Artificial Sequence: Synthetic oligonucleotide
tccagcagcctcttccaggtacagc

SEQ ID NO: 5455 - DNA, 25 bp, Artificial Sequence
  Description of Artificial Sequence: Synthetic oligonucleotide
ccagcagcctcttccaggtacagct

SEQ ID NO: 5456 - DNA, 25 bp, Artificial Sequence
  Description of Artificial Sequence: Synthetic oligonucleotide
cagcagcctcttccaggtacagctc

SEQ ID NO: 5457 - DNA, 25 bp, Artificial Sequence
  Description of Artificial Sequence: Synthetic oligonucleotide
agcagcctcttccaggtacagctct

SEQ ID NO: 5458 - DNA, 25 bp, Artificial Sequence
  Description of Artificial Sequence: Synthetic oligonucleotide
gcagcctcttccaggtacagctctc

SEQ ID NO: 5459 - DNA, 25 bp, Artificial Sequence
  Description of Artificial Sequence: Synthetic oligonucleotide
cagcctcttccaggtacagctctca

SEQ ID NO: 5460 - DNA, 25 bp, Artificial Sequence
  Description of Artificial Sequence: Synthetic oligonucleotide
agcctcttccaggtacagctctcag

SEQ ID NO: 5461 - DNA, 25 bp, Artificial Sequence
  Description of Artificial Sequence: Synthetic oligonucleotide
gcctcttccaggtacagctctcagc

SEQ ID NO: 5462 - DNA, 25 bp, Artificial Sequence
  Description of Artificial Sequence: Synthetic oligonucleotide
cctcttccaggtacagctctcagcc

SEQ ID NO: 5463 - DNA, 25 bp, Artificial Sequence
  Description of Artificial Sequence: Synthetic oligonucleotide
ctcttccaggtacagctctcagcca

SEQ ID NO: 5464 - DNA, 25 bp, Artificial Sequence
  Description of Artificial Sequence: Synthetic oligonucleotide
tcttccaggtacagctctcagccag

SEQ ID NO: 5465 - DNA, 25 bp, Artificial Sequence
  Description of Artificial Sequence: Synthetic oligonucleotide
cttccaggtacagctctcagccagt

SEQ ID NO: 5466 - DNA, 25 bp, Artificial Sequence
  Description of Artificial Sequence: Synthetic oligonucleotide
ttccaggtacagctctcagccagtc

SEQ ID NO: 5467 - DNA, 25 bp, Artificial Sequence
  Description of Artificial Sequence: Synthetic oligonucleotide
tccaggtacagctctcagccagtct

SEQ ID NO: 5468 - DNA, 25 bp, Artificial Sequence
  Description of Artificial Sequence: Synthetic oligonucleotide
ccaggtacagctctcagccagtctt

SEQ ID NO: 5469 - DNA, 25 bp, Artificial Sequence
  Description of Artificial Sequence: Synthetic oligonucleotide
caggtacagctctcagccagtcttc

SEQ ID NO: 5470 - DNA, 25 bp, Artificial Sequence
  Description of Artificial Sequence: Synthetic oligonucleotide
aggtacagctctcagccagtcttct

SEQ ID NO: 5471 - DNA, 25 bp, Artificial Sequence
  Description of Artificial Sequence: Synthetic oligonucleotide
ggtacagctctcagccagtcttctc

SEQ ID NO: 5472 - DNA, 25 bp, Artificial Sequence
  Description of Artificial Sequence: Synthetic oligonucleotide
gtacagctctcagccagtcttctca

SEQ ID NO: 5473 - DNA, 25 bp, Artificial Sequence
  Description of Artificial Sequence: Synthetic oligonucleotide
tacagctctcagccagtcttctcat

SEQ ID NO: 5474 - DNA, 25 bp, Artificial Sequence
  Description of Artificial Sequence: Synthetic oligonucleotide
acagctctcagccagtcttctcatg

SEQ ID NO: 5475 - DNA, 25 bp, Artificial Sequence
  Description of Artificial Sequence: Synthetic oligonucleotide
cagctctcagccagtcttctcatgg

SEQ ID NO: 5476 - DNA, 25 bp, Artificial Sequence
  Description of Artificial Sequence: Synthetic oligonucleotide
agctctcagccagtcttctcatggc

SEQ ID NO: 5477 - DNA, 25 bp, Artificial Sequence
  Description of Artificial Sequence: Synthetic oligonucleotide
gctctcagccagtcttctcatggcg

SEQ ID NO: 5478 - DNA, 25 bp, Artificial Sequence
  Description of Artificial Sequence: Synthetic oligonucleotide
ctctcagccagtcttctcatggcgc

SEQ ID NO: 5479 - DNA, 25 bp, Artificial Sequence
  Description of Artificial Sequence: Synthetic oligonucleotide
tctcagccagtcttctcatggcgca

SEQ ID NO: 5480 - DNA, 25 bp, Artificial Sequence
  Description of Artificial Sequence: Synthetic oligonucleotide
ctcagccagtcttctcatggcgcac

SEQ ID NO: 5481 - DNA, 25 bp, Artificial Sequence
  Description of Artificial Sequence: Synthetic oligonucleotide
tcagccagtcttctcatggcgcacc

SEQ ID NO: 5482 - DNA, 25 bp, Artificial Sequence
  Description of Artificial Sequence: Synthetic oligonucleotide
cagccagtcttctcatggcgcacct

SEQ ID NO: 5483 - DNA, 25 bp, Artificial Sequence
  Description of Artificial Sequence: Synthetic oligonucleotide
agccagtcttctcatggcgcacctg

SEQ ID NO: 5484 - DNA, 25 bp, Artificial Sequence
  Description of Artificial Sequence: Synthetic oligonucleotide
gccagtcttctcatggcgcacctgt

SEQ ID NO: 5485 - DNA, 25 bp, Artificial Sequence
  Description of Artificial Sequence: Synthetic oligonucleotide
ccagtcttctcatggcgcacctgtc

SEQ ID NO: 5486 - DNA, 25 bp, Artificial Sequence
  Description of Artificial Sequence: Synthetic oligonucleotide
cagtcttctcatggcgcacctgtcg

SEQ ID NO: 5487 - DNA, 25 bp, Artificial Sequence
  Description of Artificial Sequence: Synthetic oligonucleotide
agtcttctcatggcgcacctgtcgt

SEQ ID NO: 5488 - DNA, 25 bp, Artificial Sequence
  Description of Artificial Sequence: Synthetic oligonucleotide
gtcttctcatggcgcacctgtcgtc

SEQ ID NO: 5489 - DNA, 25 bp, Artificial Sequence
  Description of Artificial Sequence: Synthetic oligonucleotide
tcttctcatggcgcacctgtcgtct

SEQ ID NO: 5490 - DNA, 25 bp, Artificial Sequence
  Description of Artificial Sequence: Synthetic oligonucleotide
cttctcatggcgcacctgtcgtcta

SEQ ID NO: 5491 - DNA, 25 bp, Artificial Sequence
  Description of Artificial Sequence: Synthetic oligonucleotide
ttctcatggcgcacctgtcgtctat

SEQ ID NO: 5492 - DNA, 25 bp, Artificial Sequence
  Description of Artificial Sequence: Synthetic oligonucleotide
tctcatggcgcacctgtcgtctatc

SEQ ID NO: 5493 - DNA, 25 bp, Artificial Sequence
  Description of Artificial Sequence: Synthetic oligonucleotide
ctcatggcgcacctgtcgtctatcc

SEQ ID NO: 5494 - DNA, 25 bp, Artificial Sequence
  Description of Artificial Sequence: Synthetic oligonucleotide
tcatggcgcacctgtcgtctatcca

SEQ ID NO: 5495 - DNA, 25 bp, Artificial Sequence
  Description of Artificial Sequence: Synthetic oligonucleotide
catggcgcacctgtcgtctatccaa

SEQ ID NO: 5496 - DNA, 25 bp, Artificial Sequence
  Description of Artificial Sequence: Synthetic oligonucleotide
atggcgcacctgtcgtctatccaac

SEQ ID NO: 5497 - DNA, 25 bp, Artificial Sequence
  Description of Artificial Sequence: Synthetic oligonucleotide
tggcgcacctgtcgtctatccaact
